United States Patent Application Publication US 2024/0065297 A1 - sequence listing, part 9

SEQ ID NO: 27 - DNA, 3033097 bp, Pichia kluyveri (residues 1-1,516,549 of 3,033,097)
  >NCYC246_000000F P_kluyveri_NCYC246_TS
ccccctgcgacctacttcactatacccccctgcgacctacttcactataccccccccctgcgacctacttcactataccccccctgcgacctacttcactataccccccctgcgacctacttcactataccccccctgcgacctacttcactataccccccctgcgacctacttcactataccccccctgcgacctacttcactatacccccccctgcgacctacttcactataccccccatgcgacctacttcactatacccccctgcgacctacttcactataccccccctgcgacctacttcactatacccccccctgcgacctacttcactatacccccctgcgacctacttcactatacccccccctgcgacctacttcactataccccccctgcgacctacttcactataccccccctgcgacctacttcactataccccccctgcgacctacttcactacttcactatacccccccctgcgacctacttcactataccccccccctgcgacctacttcactataccccccctgcgacctacttcactatacccccctgcgacctacttcactataccccccctgcgacctacttcactatacccccctgcgacctacttcactataccccccccctgcgacctacttcactatacccccccccctgcgacctacttcactataccccccctgcgacctacttcactataccccccctgcgacctacttcactatacccccccctgcgacctacttcactacttcactataccccccagcgacctacttcactataccccccagcgacctacttcactatacccccccctgcgacctacttcactatacccccacctgcgacctacttcactatacccccctgcgacctacttcactataccccccctgcgacctacttcactatacccccccctgcgacctacttcactataccccccctgcgacctacttcactataccccccctgcgacctacttcactacgacctacttcactataccccccctgcgacctacttcactatacccccctgcgacctacttcactataccccccctgcgacctacttcactataccccccctgcgacctacttcactataccccccctgcgacctacttcactataccccccctgcgacctacttcactataccccccctgcgacctacttcactataccccccctgcgacctacttcacatctacttcactatacccccctgcgacctacttcactatacccccccctgcgacctacttcactataccccccctgcgacctacttcactataccccccctgcgacctacttcactatacccccctgcgacctacttcactatacccccctgcgacctacttcactatacccccccctgcgacctacttcactataccccccctgcgacctacttcactataccccccctgcgacctacttcactataccccccctgcgatctacttcactataccccccctgcgacctacttcactatacccccctgcgatctacttcactatacccccctgcgacctacttcactataccccccctgcgacctacttcactataccccccctgcgacctacttcactataccccccctgcgacctacttcactataccccccctgcgacctacttcactataccccccctgcgacctacttcactataccccccctgcgacctacttcactataccccccctgcgacctacttcactatacccccctgcgacctacttcactatacccccccctgcgacctacttcactataccccccctgcgacctacttcactataccccccctgcgacctacttcactataccccccctgcgacctacttcactataccccccctgcgacctacttcactataccccccctgcgacctacttcactataccccccacgacctacttcactataccccccctgcgacctacttcactataccccccatacgaccctacttcactataccccccccctgcgacctacttcaccagtggaccctgacaatgcatccatgcattagaaagaagccaaaaggggtctattagtggagatagtaaattgtagtaacagtgtgaaaatgacatcatcccgtatctccacaaccagacaatatttccactatgtaaaatttacttaccatacaactgactatggagaacacatacaaactttaaaaagcaagaaattagctgtggtacataatagccatgaataggcggctcagctctttacgacagatttcagtgttgctcacttaggggggtgtatctcgacaaccagaccacttacagactaaccactcacatggttttgttcgccgtgtcaaactgagtcagaccagcaacagcacaaccaattatcttctgacattttacaaaagttatttttgaaaatacaatatttcaacaaaaagtcaagtaagacatgaaaaaataaaaaataaatacttcgcactactaaactttccattcggttgaaaaaaaacgagaaggacctgtaaaaaaaaaccgaatgtcaaaacgagatggcccgcgctagaaaaacaaaaatcataactgcggccattccgtccgttttcttagtgtttttacattatacactatatggtgacataaatttattaaataattaaacagataatatacagcaaaaaaattggacagcataattaaccactaaaacagcacccaaaaaccaaaaattaacaaacagaaaagcatcaaaaagaattaaaaaagaaacattaattcttaaacagaccatcaaaagaattaaaaagaaaaattaattcttacaaccaccaagcaagttaatagagaacacttgcaaagtttaaattaataaacataccataatcacaaaaataccaaatcaattactaagcaaagtccagcaaagaggtgtaagttgaggatacgagtataatcaacactgtggtcatattatcattccagaacgggccctttccagaacaaaaaaaataaaaaccagagtccggaatgaaaccattcataacataggatgcatcactatattattgacatgattgcaaaccactcacagtctttcagaactaaacttgtaactaatcaataccatgtgcttgttaaaagaaataaaacaagagaaaagtaaaggaggaaacaggaagaaagagaagaaaaaagtgaactaaaagtgagaaaaagtggacaagtgcagacaccccaatatatagaagataagaaaaatttgaaaaaaattgaaaaaagtgcggataaggataaggaaaaaattgaaaaaaaatggggaaaaaaaagtttgccgcgagcacttaattttcctaaacaggtaattttgccaaaaagggttaagtaattgaaaaacagtcacacagtagtgtgcggtgtggtgacgtataccctggaaatattacgtaagcataaaatttttaagatgggcaatgttacacagagaacaaagttaattaaatttatttcaaaaaaaatattacgtaatcagacccctagtctctaccctctacacagtgtaaaaaaattaccttacaaaaaatattacgtaagcgaaagtggcagcagctggaaaaaatagccgagccgaggggtggtgtccgcggccgaaaaacaaaaatagccgagcaaggtcgacttttccaaaatgctttcagtttctatggattcagacacttgtacacagtgaagtggggatataattttttttagtgcttctgtctatgggaacatgttctcctgtattttttatacatagtatgagtggaaaacgaaaaaaaaataagccgtagagggagtaacagctagagataagaaaatcagataagcattctcggacttcggagtagctatctcgacaacgagccgcctttctggcattgttaaacctgttacaccacaagtggaccctgacaatgcatccatgcattagaaagaagccaaaaggggtctattagtggagatagtaaattgtagtaacagtgtgaaaatgacatcatcccgtatctccacaaccagacaatatttccactatgtaaaatttacttaccatacaactgactatggagaacacatacaaactttaaaaagcaagaaattagctgtggtacataatagccatgaataggcggctcagctctttacgacagatttcagtgttgctcacttaggggggtgtatctcgacaaccagaccacttacagactaaccactcacatggttttgttcgccgtgtcaaactgagtcagaccagcaacagcacaaccaattatcttctgacattttacaaaagttatttttgaaaatacaatatttcaacaaaaagtcaagtaagacatgaaaaaataaaaaataaatacttcgcactactaaactttccattcggttgaaaaaaaacgagaaggacctgtaaaaaaaaaccgaatgtcaaaacgagatggcccgcgctagaaaaacaaaaatcataactgcggccattccgtccgttttcttagtgtttttccattatacactatatggtgaagggaaagaaagaaagacagaaagaggagaaacgtttatgttcaagatctatgattggatatatagacagcctatatgttgaattatagaaacagactacaatcatagattatgtaatcacattgaatttagatgcacttattatgtaatcatttaagaaattttcgcacttacttactatgtattatattgtatattagaagatcataaaaaagtatccccctacactatatggtgaactgcgcgacagagtaaattttctgaacaggtttagaaaaaaatataattatattaaaaccacgcgacattctaaaattttatcatatacaacacaaatatatgtcataaaacatacttatacactatactgtccgaattagaagatattaatgctaattcaattaatttattaataatatgattaaatacataccttatctcatgtattgaaacataaaatatatttttatcagtcattaaaagaaagaaaatacaaattattaaattttctaatttttttatttcataaaatattttaaatattatcaacctttctacaagctctgagtaaattttaataaaataaaataaaaacgttaagaaataagcaaacgacagttaaaaaggagcaatagacatcaaaatttatcatacttgttgagattgttgagattggtaattctgagtgagactgaataataaattataatattgtattattaagttgaacctcgaagaaccaatcaaaatttaatattgctcgcaaatcaaaaaagaaattattagtcaacgttggaattcttagtataagtaccacgaagaattccaaggtttgttaatatctcttttatgttgttattgtatatactttaacttaattttatatattatatagtttgttcttttaataactgttgctgtcatgaatatggatcctgcccaaagagtcgttagattacaacaatactaattatttcatactactcataaaattctacataaaaaaccatagaaataatgaaatatctttagtaaagttgtaatcttctactaatatctacttctaggaccaaccaatccttcgtctatataagaactataaatactatgttatatctaacaatatatgtttataatccatgaactacataacttttatataaatacatacatctatactggatttaaatttaatatattgttctaacttaatattcagtgcatttttacttacattatcattttcttataacgcttaactgtataaattcaaaatatttctagtttataattatctatgtttgaacttaaatgtcaacattcttatggctcagctgtttatctacctaatatttcttttttaaaatcaaattaaaagaactatttcctaaaacatagatcataattaaggtaagttaatatttactttataacttctcttatacaataaaataaaacagttatataacgatctatgcaacattatttatgttttttataaataatgatactgtttctccaaatttatcatgtattataatgttaatattctgaaagaacgttgtttggttaatattaactaattaatttagtacacgtccttaaaacaaagtattttgtatttcaacttttattaagcaatccatctctttaatataccaacccctggctctaaataatatgaaattttgttttggtaactatgtacacccattctaattttatatatccttacataataataaaacaatagttataccaaagcaaccataagttacatgaaatcaaactgaatgctcggctaattaggtataacaaggatttcggctaaagatgattaattttatgcgaggaaattcaaaaatcaaaatttcaaaacttatccgaatcttcaaatagccgagacctctggaatttccaaattaaaaaatacaattttagccgaaacagcaatggttttttcaaaatgtttttgtctaaacaaaataaggtgccattagttatgttggggtatagtgaataattaatagctaaatttaattgttaaacgtatactttattaagattggatattgttctgattggtcaactattatattctaagaaactgctaagtagtatttaatatttatacgtagtttaaccatcgattttagttatattattttttgataatgactctcttaaagccttttcttcttcctctactgactgtgataatatattgtgataattcaccagtagttaaaacaaaaagagaggaacatgcttaaatacaatataggtttataataaaaatattaattgctataatattaaattaatctgatttagtataagattaaaataaagtcaaatgctaagtaaattaaattcactgacatttctctaacccaattaactgatttagcattagataaaaattaaaatattttatatgaataagtggtaataaaacaattacaaataaaatgattacaaatggtgttttcattacattaaacgaagcacgggaaaattttaatgataaatagattaatttatattatactaaactaattataaaggcataatatttggaattggacctaaaggtgtaattccatgtggattaatttctggatgggactttgtataatgaaatttaatatgttcaaaattagttgtatccttaaaagcattattattccaatataattcttttaaatattgattaatatttggataatcatgtctaatcattttaatattacatttaaaatgttgatgataaacaggatcaaatctaattaatgttgtaaataatctaatatctgcttcattgattaaattgcctaataagaatttttcaccattattatgtctctcttttaataaatcttctaatttatctaaatatttgaaaacatttttaacttctctttcatatggttcttgctttgttgcaaaacctgatttatagacaccattattaatatttggataaatccaatcatttaattcatcaatttgattttttaaactttcaggataaatatcaatcttagcaaatttttcatcaataattgaattaaattcagtatttaacattctaataatttcagaactttcattattaacaattgtctctaatttcttatcccataaaactggaactgtaaatctaccttgataatttgaatttgccttaaaatataattctttaattcttttgaaattatataaaggatcaggagttgaatcaattgcttcagttaaaccttcttcctttgttgcaaatctccaaccattattatccatatgccaatgaactacagtaactccgattatatttgttaaaccttttaaaatacgtgtaattaaggtacgatgagcccaaggacatgcatatgagacatataaatgatatctattaggttcaggtttaaatttaccattaattgaaattgtgtctctaaatgatgataccaatctcttgtattcaccatcttcattagcaaatttttgaattacaatcttatctgtcattataatatgttatattatattaatatgtgtatgtgttgtattaattactcaattgtaagtgttgagtattctaaaggcaattgtaagcaattataagtacaaattgcaggtatttatataagaaaagggaagtgaagaaggggaagtgtaataaattgttagtaattatattagtaatctcattaataagctttgttatcactttgatcatttgaagttttcttttgtggagtatatcagttatttcatatgagtttatatatatgatagtagttcttcttatatagattcttatatagatttagagaaatcatcctttactaaggttaaatatgattgtagaagtttaaactaacttatatagtcaaataaataaatatctttcagcttctgcaatagctgaattatctaaattatattcatgtaacatttctttaatattatttaaattgttatcaggtaaaaatcacttattagaatatgtcagattcagtaatttggtattattaataagtcttgatattactaaaactctttcaatttcgaagaatatttggattgatccgattcaactgttcaactagatatactttgggtatattgttgttattattaataattgacacattatcaaattcttaattcatttaaataaagaaatttaatcatttatattccattagtaataactgtatcatactctataattaaatatcatattcaaatattgttctattttctagtttgaactcattaataaactaacataaccttcaataatttataattcaatgatttctaatttgcctaatcaatgaatatatcagttgcaattgaaattgacattaactaaaatatgatattacattattatgataattcttaactgttctaataatatcctattaattccattattattatactcattcaaatcatatcatcaaaaccttaaatcaatatcaccattatttacacttcattacacttaattatgaatgtatttaaccagttgttaataaaaaaaccaatatccactaagaagaaaactctgttaattaacatattggaaatatttactatgtgagggaagttctcttaataaattttaattaactgttttattgacaactctttctttattgtaaaatctttaaatggtaacataatgcaatatgatgttgtttgtacactgttggttttgattatgtgaagaaaaaggaacacccatatggaatattcaacggttactaaatatttaataatagttaccaaataaactgcattcgattgaagttatatcaaacttcttgaaatactgaaatagtaatgcttaattaatagtatatgttttgggtaaaaggtttatgaaaacgaaacaccatgtttataatcaaaagtttaataatcaattgatttaactattctattactaattcaactaaaagagaacaattctgattatattttcaacattgaccaaactgacttgtactacaataatgaagtattaatgttaatttgaaatatcaaatagccaactatttacataaatagtatttgtcaatataaataataattcttttatgttatcataatcatttgaatataatatgcatataaagacttttgaggaatttataatacatcttaatatcacaaatacattacatgatcaaattataccccaatattatcaggctttaatacatttaaggtaatattgttaagtacaataattgaagtctcaaatttgtaaatttcatattccaattaccaaaagtaaatagatttattcagattattacaaatattataaagatgatatcaattgtaattacaataaagatggtaaatattaaacattcaataaaaatatttaaaatatttagttagaacaaccttccacacaatcataataatcattacattgaccatcaacaccaccatatgtatttgtgtaaatttcaccatgaactgcaacttcgatattttccaaatgattagaatcaattggttcaccaggagaaggatcaatattcatatctaaacaccatttccaaccatcattgcttgaaatgaaactctgtgcactgtctgcccaaacttgagtttcatctgaaccttgtgtatccacaaattgttgagctaaattttcattaacattatcataattatatgaaacccaatcaacttgataacctcttttcaaaagacgaaatttaagagaaacatcaggttcacctggaattgctttatccaatctatcaacaaattcagcactagataaatgaggtaatgaaacagctaaatgatgacctaaatgtgtatcaaattttgcaacagtaacatttgaatttaaaattgattcacttcttttatctaatttagaaccaatattaagatcattataggtacctaaaagtaaagttaaatttttaataattggatgtgaagtaattgaatgatcagaataatcagatgtaacattttgcattgattcagttattggaataatatttgaaccatcacttcttttagtattaccattagttgcacctgaactatcacctaaagctgctaaagttgctgcttggaaagcaatagccatagcaacagaaatccaacatactgctacagttgcagaacaaactgcagctgccacacccatccatccagcagacatacccattaaaactgttgcattaccttgtctgaagatattactaacagaaaatgcagtaacttttgtaataccgtataataaaattgaaataaaaacgattttaactttatccaacttaaacatttttgttgttgttgattctaataatatagtattataatattataaaatataaatatcagttgctttcaaaacttcaaggggaagaatacagttatttatatagttttcttgacttatgatcacagacataaccatatatcggttaacttacaaaacaaatgtatactagcaaaatatagttattaataattagcaatcatattttcaacttaaactttgtaaactttgtaaatatggtacgattactttatttgtatttatagtatctacaccactatcgtgatacaaaagcaagaaaccttaatcaaagtgaaacaaaaatgaacaaatagctaagataaggttttaaaatgaaagcaaatgcggtaacaccttttccactgcgaaatttctgatgatcattgacttatctcttctgcactttttcttcacttcttcttcatctaatcactgttacaacaatggaacttactcaacagaacaaatcaaccttcaatgctgctttagtattggcttttggaactatattatcaattattatcctaaaatttggatcctatacaccttttttacaacctgcaaatgctaaagttcttatgcaacttctatttctatggttaattattacaatttttttggttagaattatgacttccatcccagaatatattaaatatatcccacttactattagtatgctgataagtatttctgccgttattattcttggctttgaaaatgatgtacacaatgattaaaaaattgataattaattaacatttccaattgttaaacttgacaaatttagattttgtgtcaatattattaactataaactcagctttctcttttacttctttatcacggtcctttatagtgttttttcttatcatataacactacatttggtatattattaaactatctgaattttaatatttaaaagtcaaatcataccctaactaaagattcttttttcatctatttctttcttctttattggattaattccatcagtggaatagcttcatttaaattttaatcaaggttttctcctaatgtattgaaagattttaagtttgatgtttcaatttattaatattgagggaaagttaaatcaatttaaattaaggactttatttatttaatcttttgtctttatcactgttaataaactcttttttcactcttaaacgattgttttatattcccttttatataacacttggacaatcatgtcatatggtacttattttgcttatctaactgaaacctgaatatttatttttaattatgtctttaattctaaccatattcaattaaatttgagccttttaaaaccctaaaaatgatttgttaaacaatttatgataatatctaaccaaaaaatatttaatatttaaaaaacaactctctctttcttatattcaccaaaaccactgttttgaaagaaaatttttaattttttttagcaagatttttgcttgatatttttaaataatcataataaatagaagattctctatacatattttttgagaaaacatctaaattcactgatttttacctaattttgtgtggatcacgtgaaaatgtattgtgcagaatgttctgaggggttgaaaaccaactgaatggggctatggctcaatgatagagctttcgactccaaatcgaaaggttgcaggttcgattcctgttggcctcaattcaacttatttttttacattttattcataaataagataagtttaatagatctattctctaatcaactaacttcaattaaatagttactttgtttttgatgaatgaatattaaatttgttttttttttacacatttttcaaactagtttctgttttagataaatcaatatcatctattttattaataatttgaatttgatcaaaatctattgccaattccttagatttattcaaatatttttctgaaagtttagtatcatttaattgtaaatatgcaacacctaaggaatagtaagtaataggtaaaattggatttttaatatcaacactggaaattaattttaaataaatatcaatagccttttcataatataatttattatttgatttttgacctaattgaaaccatgaagaaccaatatttaaaatttgtgtttcacctgaaaccgtattattaaatcccgatattgcagtccatagaaagttactttgtaatattgttaaactatctgatattctacctaaattcatcaatgtcattgcataaaaatctcttaattttaaatatgattcaatccaagctggccatactttatcttgaaaagttctagttaattcccaacaatttataaaatctttagcctcctctgattcaatattatcttcaatccattttgttctatccttatttatatcaagtagtccattatttcttttagaccaaatatctattaattctaatatattaattttcttattatttgtagctgcccatggtaatcgtttcggtatctcataattttcaatataatcaactctatcacgtaattcttcaataacctttgataaactattttcatccttgaatgataatttcagcattgcccatcttgtaattacaattagatctctatcaattaataaatctctctctggattttcataatctatcttattacgaattaaattctcaaatatgaatgtacttaaattgtagtaagttaacagtaattgctctttcatatctaacttttcatacatttcaccaattttcaatacaattccagtatattttaaactcaattgatccattccttcattcttagctgtatttaaacctttttgataattcttcaaagcttttaaatattgatcatttccatctctttcttcccataaacctttccttaaatctttactgacattagtagaatatggattccatggttgccatagatacatcgttactgaacctgcaactagaataaatgtaccatatcgtacatatttacctatcctttcatttcttttcttatccctattgaatttctcatgttccttaatagctctctcacttggtgggatatacttgttgactttcttgatattctgtaaaaggatgttggttcttttcaacattatatatgagtaattgatagatgtaataagagttgcagaaatcctagaaagaagaaacgtaaagtcatatatcaatctctaatttaacatgaaaaattcatgaaaagtgaaaatatcatcaaattctccatttgattcatgttgatctttggagttttcttaggatatcaatgttcatttggatctgatttacatgtgtctatatgatgttgatctatttgttgtcatacactagttttatatatgacgttaatagggtaagatatacgatgatttcaatattgaattaaatagtacttattaattatacaaaaatatttctattaatcttgtatagaataaaaaaatctgttctgattgacattaatagaatatattagaataaatttaaattaaaccgaaaagatgtcgaacaatttaaacgaagattcaaatgatcatattgaagataacgatatcgtcatggatgataaaacaaggcatatgcatgaagttatgatagatgttacttaccagttgatccggcatgttcggattcctagcacctaaatctatacttcataaattccgtcccagagatcctaacatggggggtcaacggggaagtagccataactttcaactttagtatctttgcacagcaagcgtttatggttatcagaagatcattatctcaaacaaacatcaaatggtgtggtttcttagaaaatgcaatttgttcaatcatcaaatgatcattatctccgaaggtacgtgaacatatcgagaagaaatgcgttggtccaatggatacatcggtaatgtatttatgtgaagccataaaatttttagatattatagttgatccacgtagactatatgctactatcatggacatcaaattagaaaaccatgattacataaaattttatgaagaactgaaacgagttgatatgaccgcaaggttattaaagatcaacccaaatgcacaaaaatttcatgttgatataattgaaaataatatgtcaaaacttccaacagatttgacaatcaaattagaagaacaaactctaacctttgaatttttttaaaagtatataggtattaggcctagatctatcgaacattatgaaatgcttaatgtaaatgtaaaaactaatcttgaaaccaattaaataattcaatattgtaattttactgttgattatcaatagtgcaaactaacagctttgccacctatatcacaccaacagggactccccatcgaagtgaagcacaccaaaagagaagcccagaagatctaaaagaagaagagaaagtggcaaaaagttgaaaaactttgcaaactgaaaattttcatcctttttaaattggaactttgttttattacgtaatttttgagatgaggagagagatgttaattaactgctacttatacatcttatcttatcttaattttattctacaccgacaatatggacactattagagataaatacgacgtggttactgcatcatttgtatcacaaccaagatctagggaagaatctaaagctttattaagaaaatttagagataacctgaaatcatcatttgatgaattatcaaatgctgttagggaagattttaataaacctgaattagaattttatgttgcagaatatgcacctgcaattggtgaattaactaatattttaaataatttagatacaattttatcatcatctaaaaatgttgattcaataccaataacattttcaactttatcaacagaaattgaaaaatctccattaggtacaattttaatcatttctccatttaattatccacttattttagcagtttctccattaattggtgcaattgcatctggtaataatgttgttttgaaattaccttatgatcaattaccaaatttctcaaatgctttaaaattagttattgataattcattccctcaagatcaagttttagtagttaatggtggtattgaagaatctcaattcctcttaaatgattgtaaatttgataaaatctttttcactggttcaactaatgttggtaagattgtttataaagcagcagctgaaaaattaacacctgttgttcttgaattaggtggtaaatcccctgttttcatctcaaagaatattgatatatcatcattggaaaaattattgaaacgtttattatggggtaaattcacaaatgcaggtcaaacttgtgttgctcctgattatttattaattgattcatcagtctatgataaagttttaaatattatctttaaaattttcaaatcagattttgcaaatgttaataaatcagatgaattctctcatattgttaatgaaagaggttttaatagattatctcaaatcttacaagaaactaaaggtgatattctatcaggtgataataaatcagataaagattcattattcttctctccaactattgtatctaatattgattggaatgatagtttaatgcaatctgaaattttcggtccaattttaccaattatgaaatataattcatcattaactgatattgttaaaaaagttgcttcaattcatgatactccattagctgtttatttattctcatcaaatgataatgatttgaaaattttacaaaaacatttaagatctggtggtatcgtagttaatgatgctttatggactgcaggttgttttataactccattcggtggtataggtactagtgggtttggtaattatcattctaaatggacaattgatactttcactcatgaaagagccgttttaaagcaacctttatgggcagaatctttaattagttcaagatatttcccttatacaaaggaaaacttaaaagctttaaaattggtttcatctttacctgaaataccaattgcaactttaaagaattttgcataccttctaaccatatttgctattggtttcttcctaggtaaatacttctcataaacttgaagtgctacatttatttgttattgtctttttattatgtattaagagtcctttataaaaaattatttagttattgttacttttccttttatacattaaatgcatatgattattattataatatcacatcaatcgaaataatacccacctgcaataaaacgaatcatgtattcatcaatatgtccaattgaatcatcatcgtcttcatattcttcttcttcttcttcatttccattctcatcaccgtttccatttccatttccattttgttcaacatcttcatttgaatctaactgtttatgtttttctcttcctgcaatacgaactgcaagtgcttcagcttcagctgcctcttctccttctttattatttgaaattgaagttgcatttccattattattaacatttccttccttcttattaccatttgtcttttcatcatctgagaagtcttcaacatcagcttcaagttcatttaatgcaacttcagcagctttggcatcatcttcatcttctgccatctctaatgctttggtaaattcagaactagtcatttctttctcttcattcataacttcagttgatgatttacctaataattcttgaactgaaactttattaaaataatctgttgtaaaatcaccttcttgaataacaacatcatctaaatatttcttttgttctgccttctttaaaatatttgcttcaattgtatattcagaaacaaatctataaatatgaacatctctagtttgaccaattctatgacatctatcttgacattgtttatcaattgcaggattccaatctgaatcatagaaaataacagtatctgcacctgttaaattaatacctaaaccacctgctcttgtacttaaaataaaacatttaacacgcgtatcattattaaaactttcagttaacaattgacgatcttcaatttttgttgcaccatctaatctcatataagtataaccacgataatttaaaaataattccaatatatctaaaacttttgacatttgtgtgaaaattaaaactcgatgaccttgagggattaactcagataataatgttgcaagtttttgtaatttaccacaatcatattgtaataatgatttatcagggaatgcaattgatgaactaacttgaatttgatgaaatggattttcaattatattattttgtgaatcatacattaaattttctttcagttcatctgggaacattaagttagtaaagttagtacaaactgccttaggagttacaaatgcatattcttttataacaaatttagaatctaatgcaatatcagagatggatttcatcagtttcaattcttgaagttgattagttaatacttttggtttcctcattgataacatgttaattaaacttggagatataacacatgatttatcacaattataatcatttatatattttttatgtgacatttcatttaacaagttaatattttcttcattaagcaaatattcataataaagttctaaatcattgaagttgggtataagtgatttatcctttatttccttttctaattcctgaattttttgtaaaaatatttttgatgcacttaatctattaattgtttcataatggtaagaattcatattttctgaacaattggaaatattattcatatttaaaaatgataaatcaactttttcaatttcatttgttttcattaattgattaacctttaggaaattagattcaaaatttgatataattgatttctcttgtgaaaaacttgttaaaattggtctaacttcaaataaatcaggatgattacaaactttccttaattgcattaaacagttgataatactcaaaaaattcccacttgcaagtgtttcctttgtttgtgctctactcataaaatcatcatataataatctttgacgttttgataacctacaataaacaatatgttcatattttgcaggcatttgcttttcaacatctttctttaaacgacgtaataaataaggtcttaaaacttgatgtaatttatgaacagtttcctttgtttcattatctttaccaccttgttgaataattttatcaaccggtttaccaaaccattgttggaaatccattaaatctgcaaaaccttcaggcattgtaacatcaccctctcttgaagttggcattaaaaaataaagtaatgaccataattccataatattattttgaagtggagtaccagttaataaaattctattttcagtattaaaatttaataaagctttccatctttgagatttaaaatttttaatattatgagcttcatctaaaatcatatacttccatttttttcttctaaaaattggttgatcatgaacaactaattgatatgaagttatacaaacatgaaatgaatcaggggtattccaacctttacgtttttctttacgttgttgaggtgaaccataataagttaaaactttaaaaccaggagcaaatcttttaaattccatttcccaatttaacatgacagatgttggaacaacaattaaatgaggaccccaaatatttttttcacaagctaaatatgataataatgaaattgtttgaattgttttacccaaccccatttcatctgctaaaataccattagtaccattattataaagagatgccaaccaatttaaaccttgcttttgataaggacgtaaagtaccctttaataaaattggagttggaacatcgggtataccttgttcatcaagtaattctgttttttcaggtgatgatgaaggtgtttcatcattttgatttggttcactatatacagattcatcatcctcttcatcctcatcttcatcatttccttcatcatttcctgtattgaaaagtgaatgtaaaccaggtttattttcttcatcaattgaatagtcactttcattagatgataatgatgattcatcactatcagataaatcagaatcatcagatgaggaattactatcttcatctaataatggattagaattttcttctagtaatttgattctaacagattcatctaaattatcaacaatcgtaggtattttttcagaagtatcatctttatataacaatgaaagactcgaattattattattatcattggaatcagtaccattgatattaaagttttttaatttttcatatttctcctttaatttttcatctgataatttactatcatcatcaacaggtatattttcattttgatcaatactcatatgatcatcctcatctgaactacttgaagaaaaattatcactttcactgtgactttcactatcatcatcttcactattattttcactttgaattttttcaggttcaacacttgaattattatttgaagattttgtaatcatttgagcacctaaaactttagtactatgatctaaaattttagataattgttcctttgattttttcaatcttaaatgttcattttctctttcttctaaaactttataagctttaactgcaatattccatttctttttaacctctttagctgcatcccttgccaatctataaattttcttttgaaattctttttcctttttatcattttcttgagataatcttttaaaatgaacttcaatcatttgagcaattcttttacatttttgaattttatttgatcttaaatcacgaattaattttgaagattttaaaccttgagcaattaaatgatcataatgagataattcatttttcattctaaatggattttcacttaatttataattatttatattataatctaaatttcttttaatcattgttggttctcttacaccattaggaacatttctaaagggattttcattataatcaatataaagtaattctttttcatttatagcatgatcaatagattttataagttcatgttgattttctaaatattcattaaatttatcagattcgatttcaggtgcaggatcttctattatatttctataagaatcaaataattgagttatattttcaaatttatgtacaggtttatgatcaggatgagatattattggaggtttaattgatattttaaatttaatctttggtagatgtattattttttgtttcttagttgtaggagtgtctctggtgttatttcgttcatgatttgaattatcatcatatttccttttattagaatcgatattagtattatcatcaaaatctagcttttctgatatcctttgattaacaaatttatttaatttatttttcaatttaattaaattatcattatcattatttaataaacgacgtgtttgcctcttatttgattttggccaaatacttaaattattatcattttcataaattttaaaactttcactatccttatttaataatatattttcaggtgttggatcataacttaaaattgaatggaaattttgaagatgataaagttgatttgttaaaatatcagtttctgcaattaaatcaattaatttttcatcatttgaagataatgaatcattagacattattaaataatatgtcctctactaggaaatacccttcaatatgttctttatcaagtgaaagtgaagtaaaaagtaagagaaactataagaaaccatagtaaacctattgaaataaaatgaaagagatctacagagccgccataacagggcaacggggcaattcttttataaaaaaaatacttaccgacccatcgaccttcactctgtgcaccactaagaaattgtctcactataataataatttcaagtttttctccaaccaacatgaatatctctctattaagatactctcccctcaatctcttaatttaaaactctttcattttagataacaaaacaatgttcactagatcaatacttaaacaatcaaacattggaattcaatcttttaaaagatttaattcaacttcaaaaaaatatggattaccaaaatttttacctgatccagaaattgaatttggtattaaaactccaaaaaattatattccaccacaatatagaaatcctcatttaaaatatgatgatcaacaaaatagagttaattttggtgaagaaattcatccttatcatgattatatggatatgtggtctcctgaccattttcaaagtgttaaagatcatgtagctgttagacaattaacaatttttttctcattattaggtttatttgcttatagtatttacgttttagatatttggcctgaaagaccaaatatgccaagatcttatccttatgaaggtttatataaagatttaggtggtagagatggtgaacaatctttaatgcaagctagagttgataatggtaattaatttagtataatttaatacctctataccatcatattatcatatcattatatcatcatatcataaaattctatatattctctttattatttataaatactacactatacgataactatttattattctatattaaattaaaaaaaaaatttattataaaatttatatgactatatgatcatttggccctatgactatatgactatatgactatatgatcatttggccctatgactatatgactatatgactatatgacccaatgactatatgactatatgactatatgattatatgacttcactctctgtatcatatttcattgtactatcataaagtaattactgattaaaggttgatatctttcaaatgattacgtaagtatatcatgattatgaattagatacaaaacattgtatgtacaattattataataatttaaataaaactaaactaaattaaactataaaagaaattaaaaaattaaagttaattagagtaacaaaattaacaccagaatttataaagtctataatagaaaggttttgaagcaatgaaagctctctcttctgcaatttcttgttttaataattctaaatcaacttctcttctacctgtatcaatatctaaatcacctgcaggaataaataatttaaaatctttcttatagaataaccaaaagaaataacaaacaattaaaattggaacacaaaggaaaacttggaaaaatgatgttgcatttgccttttcaccaattgggaataatgcaacccaaaattgtgccattaaaattaaacaatttaataaaacaccaaacattgaaccaattatacctgattgtgctttaaatggtaattcatcagtacctctacctttagcctttaatgcagctctaaatcttaaatgacatgcacaaattgaaccccaagtaaaaattgatgataaacctgataatgctaacatccaatcgaaaacatcagcctgatgttttgaagctgctaagaaacaaagtaatccaataaataatgaaattgcaacaccaactaatggtctaccttctctatcaatataaccacaaattcttggtgcaaaaccttgatctgctaatgaagcaacagttcttgaagctgcataaactgatgaattagcaacagaacaaacagcaatcataataactgcattcataactgatggtaaacctttaataccagcattttgaattgaaataacaaaaggagaagcagctgcacctgaattacctaataatcttggatcagtataaggaacattaacaccaactaaagtaagtgaaataatataaaataatgcaattctccagaaaacttgctttgttgcagaaggtaaagattttcttggattttcagtttcagcagctgctaaaccaactaattcagtaccagcaaatgagaaagcagatgtaacgaaaactgcacaaacacctttaaaaccagctgcaaatgcaccaggattatgccaatattggccaccaatataaccacctcttggaccaccaccacaattaatgacaatacctaaaataatataaccaagaattgctaaaacttttaaaaatgaaaataaaaattcagcttcaccataacctttaacaccgaaaatattaataaataaaactaaaacataaaagataacaacccaagcagcagaattaatttcatcattccaataatcaattgtaattgcagcagcaactaattctaaaggtaaaacaactaaccattgtaaagcataattccaagccatacagaaaccccaagcaggtgtaataaatctagtattaaattgaacaaatgaaccagcaactgggaaagcaacacataattcacctaaagcttgaacggtacaatacatcatcataccagttaaaatccaagcaataactaaagcagctggaccaccagttgctaaagcagaacctgcaccaacgaataaaccagtaccaattgaaccaccaattgcaatcatttgtaaatgtctattttttaaacctctctttaatggagatcttgcagcaattaaattagctctttcaacatcagttaaattaggatcaatttcacctaaatctaaaggtttaaaaccatcaacaaaatttctccaccaaccattattattattttcatattgagcataagggtcaacataaccaccatcattattagcatttgaagttgaagaagtttctttattataatcgattggagatacattagtatcaactaaatctttttcgtcataagttttttcaatagacataatgaaagaagattttttttttgtttaaaggaaacagaagaaaaaaaaaggaaagaacaaagaataatagaatgaaataagatgggaaaggtttgaatttatataataatcagaaattaaattaaattaagttaaatgaaaataaattaaatggacagttatcagataagagataaactgggcagaaacagaacaaatggataaggttaattaaacagtgccattcaagacatgtaagattagattagattagattagattagattagattacgatgggcagaaatagaaatcgtaataccgttcgatgatcaaacagataattatcattatcatcatattatcattatcatcattatcatcataataatcattatcatctaataaaattttcttatcagttagtaatgcctcacttaaaattttcttatcgcttatattatcttattttctcattgtttcattctctatggcatttaacgttggttaattgattattcttgattattattgattattatttaagatcttattatattctatctaatgccatttcatttatatggcattattatcatttattattattattatttaaaattattttaaattatttacatgatcttatttaattatactagtctatacattacgtaatcaccatcattttaatacattatcagtatcaataatccattcatcattttctccatctctgataatcataccttgatcttgtaaattcttaaacatatcctgtggaacccatccattggttgcaatgaaaggtttactactattctcaatttcataattcttaatctcattagtaaattcctcaatttcaacttcattaaatttaattaaattattttctccaattttatttcctaaaataccattattattataattttcccacatggtggaaatttcaattaatccattctcaatataaagataatctttaatttctttaaaatttaataaattaatatatggatttttaactaatttaataactggtgaaataactccaactaattctttacttctcttattaataccaacttcccataaaaattgatttctagttctcttaaacataaatttatattgttccttttcaacatcatccaaattctcaaaatcttcaatttcttcatttaaactgaaaattttacctccattatattcaataaatttaggataattactaattaagaatggtttaataatacaattctcaaaatcaataaattgatatcctttatcttctttcctaataagaacattcatcggatctaaatctccaatttgtaatcttggcttgattaattcttccatatttggaattaatgtctcttcagagttaagattgaaaatttcgcctgaaattttattcattttctctaaaacatgcttagccatcaataaatcttccttcttttccttaatttccttattaccattttctaataattgtaatttcttacctaaatttaaaatctctaactcatttaaatctttaatcatctttaatggttcatctcccttccatggacctgcaaatttattaatttcttcatcacttaaatattccttatttctataataagcagtttcaacacttggcccaataacccatctatcttgattttcaaatgctgttaacccatttggacaatcatctttaaaataaattgaaccaaaatttttaaatataaaatcaccaacaattttattaaaatctgccaatggttcaataacttcatttaatttttcaattgcaattggatcatctaatttattattttcactatcgattaatggattccatttcttcattaatgaacattcaacatcttcaacatattccattaaaataaattcatgacctaatggattttcacttgtactactatatgataaaacttttggaatatttaaatttaacatattatttaaaaaatccattgttgcaacttcactctcgatctttctcttagtgaaaagtttagaatgtaatgtatatggtaatcttaaaattaatttcttatcagtattatccatttcaattctataaactctatgatgtttaccttcatgtaatgaaacaatttgtttaatagtaccaacttctttaatatccttgaaaaaatttggaatattattaagtaaaactttacaattttgaatatccttaatagcatcaggattactctcttctgataatttattactaactttaacattttgacatctactaattaaatcatttaatccttgaattgaaaatttagtaaatcttttacttttctcaagagtatcattctttaaccatgtaccccaagaatattgaaacatatgttccctatttggatcagcatcatctaataaattagttgatgaaactttacccttgtcagaaattgttgattgaaatctaatattgttgataatagttctagaaccaccaacaacactaactctgttagcagtcttcaataaagaagcagtgtttctcaataattgtctcttacctacagctgaaagcatggtctgtatctctatctatatctatatccttcaaaagaaagactcttctccaatagttataactttaaattgtcgacgacccactgaaaaattcatgttaaacaaagtccgcgtaaattttcattatgcataattactttactatatatggaggctcattcttttctttctttcactttttcttttgcttcttttgcttcttttgccacagctcactgtagataaccatgagtcaagtagtaaaatgtaaaacaagagtctcagatagattcacccagtctcagagtgaaaggacaattcttgagattttgagaatgtcaatttcatgtatttcattcttacgtggatttttcaatgatgagcattttgaagataatgtgtttcaaattaataataataataataataataaaaataataaagtaaataatagtaataatactaatacaaaaagtgataaaattaaaattaaaaatctaaagaaaggtgtatctgatgaatgtgatataattaatgattggattgatatttcaattaagaattcaattcatgataaatatttaaaggcaattaatttatcagttatcacagataaggaaaatccaactgatatatttgaatcatatattttcaatattgattatttaacaacttcagttcaatcaatttcatttaatggtaatataactttaactcctggtgaattaactaaaattcaaattttcagtttaatgaaaaaaattatccttttaacacaatctttatcaccattaccaaataaaagatatttatcaatgagattattatataatgataaatgtccattagattattatactgaaaattttattgattgttcaaatgagaaaccttcaatgattaaattacctgaaaatttaattgatgatttatatattcaatgtggtgaaattaattctgttcatcatgaattatcaacttgtcttatctcaaaatcaaatatgtcaagggaagattatgaaaattcaaatttaatatcaattgatccatttgatttaattgaaagtaataatagtaatagtaataacaactctaatgacacccctaataatgatatgaaattaataacatataataattcacaagtttcacaagttaccaaagaattatacaatgtaatgtcaaattttgatactactattcatgatggacaaactcaaattatggattcaaattcacatgcccataatttaaatgataattatttaccaattttatgttcatgttcttcaaattcttatttatcatattcttcattaattcaatgtaaaaaatgtaaaaaatattcacatagagtttgttattcaatcaattctaaagatagttcattctcttgttcaaattgttctaatatgaaaaatttaatttctaaaactgatttattaatattttttaatttaagaaaattaattgttttcttccaaaataataaaactattgaacttagatcaatttcagattcattgaataaattaggttatgaaacggataataaaagtattgttgaaacagttgttaatgcattttcaattctaattcataagaaaatcttagccatgaaaaatcataaatcttttaatcatacattattcaatgttgattttgatggtttaatgattgataatagaattgtctcaatgggtaaattttatattcgttttaattcaaatgcaattgatgaaattaatgaaatattaaatccaaaatttggttatgatcaacaagttaaagaaacacttacaactatgagtcaattaaatgatgaaacaattttcgatgaatttgaagaatttaatttagctgataagaatgataataataaccaacttccaaataaaaaagttaaaaaatcaattgatatattcagagtttaaactaaaactttctaaatctttgctagacattaattgttattttataattgtataaaaatagtttataaagaaaattttaatttttttcaagaatattggataaatcactcattctaataattcccttaaacaatgaacctgtttctgtattcttacatacaaataaattaaatgtttgtaattggaacattaaatcatatgctgttagtaatgtaaaatcttcattaactataagtaaatcttctttatgtataatattagagtataagttcagtgtttcattatccatatcaaaatcaccattcttgaatgatactttagaataattatcgatattctccttcaatttcattaacaaatcattataactaatccatccaactaaaactggtacatctttattttgtaaaatgacaaacccatcattaatagtttcactatcaatttgttcatcttgataaattgtttcaatcttattaatcaactcatctatgataattctatcatcatcaatatataaaacaaaaggataataatcactccccagtatttgaaataatttcatttcagaaaattgggccattcttaatgtctcagtaagtcctggactaacataatttttatttaaattcattaaccataattcgaaaaatcccttagaatcaaaaatatcaagtatagtctttgcaacaacaactcctaacattaatggaatcatataagtaacagctccagtaatttcaaaaacaatgacaacagctgcaacacttgcattagttacacctgcaaagaatgatgctgcaccaacaattgcatatgaacctggtgaaacacaattcttattctcgttataacattgtaagaaaattccaccacctgatttttcttgaataaattgaacaaattctcctataaatctaccgattaatgcaccaatattaagagctggtaataagattccacctgggatgttcaatgtataggaataatttgattgaaaaaataaaacaactaaatagatgaacatttcaaataatttgtgagatgattgacaaactgcttgattgaaattcttatcattttccttacaatcatggaataaacttaataataaattattcaatgtaagattactaaaacttattggatataacataattattgtcaaaacaactacaattaaaacttccaagttttgattttccaaaatagtatttaatattgggaatttagtgtttatgagatcaatatttctagattttatcttttctttataacttaaaataatcatatgtaatttcttaaatccaattgctaagaatccacaaacaaatccaacaaacatgtaaggtaaagtttcaaaaaatataaaactattaccaatttctactataaatgtatcattaatttcaatttttttaaatggatgaactttgaaaaagataaatgttgcaattgaagaacaaacaaacccattccaaagtaatgaattaactcttgaacttaatcttaaaatttccacagagaataataacccaccaattggagctccaaatgctaatgaaatacccataacaaatccaattgaaataatttcccttctaattgcttcattttgtaaatttttaaatttaggagatatggttgcacttttatcaataatgtaattaataacaccacaagagatatgaatcaaaggaccttcaaaacttaataggaatccacctgatgcacaaatgaaaatcaatgaaataaatttcctgtaaataatttcaggttttaaaaaattattattaactctaccaaatattatcaactttaattcactaataccacttctagcaattgaataatcaaatttagatatccaagttccaattttggaataaattagggcaaatattaataagattatcaaacctactattgatgaaaaacctttcggtatattatggttatagacataccaattatcaacacatgattcctcaacttgaaaaaaattccccctacaataaccatatttgagattacttaaccatgttagagaccagtctaaaataatagctagtaaagatatcaatattgatgaaacgataagaattggccattgattatatttcgacagaagattagagaggtaagattttgttgaatattcatcaattggtgataatgatgatgctgacagtgagtcttccattcttttcctagagtataatttcctccagggtattatttggttatcgaaataagttctatcttgttcattatcgttgagattatccaatgaagagttgatattatcatcggcgtctatattgtgagtatttttgtatgatagtataggtaaagtacttggatgtgatataaagagatcctcctctgtcggatacaggttactcctattccttaccatagtctgtagaatgaaaatcactccataagaaagaccttccaatgttaatcttataaaaacgttcatgtacgtaaaatacgcggtgtcccaaaacggcaaaagatcaacatgtttacttttcagtttgttgatcttttattgatgatattattttatctttattttattttacttcattttattttattgtacgattaagtcatctctttgctagtttactttctagctcttcttcagtaatcacaaaacatgctgagaactgtacgttcattaccttctctaagattgctatatcagcaagaagctaaaactttaattaacaatactccaaaaccggtattcaattcaacttatagtcatgtgtctggggacttgttccatccaacaacatcaacatctacaacttttactagatcagttcatcaaactactaagaaggaaacagttttacttgattcatcatctaataaaactaaatttacttcaatgaatttacaaggattaaaggctgaatgtaaaaagagaggattgaaggtatcaggtcgtaaaattgatcttattcaaagattggtattagaggataatgctcaaagtatggaaaatgcaagatctttttctaatatagtatcatcatcatccaacgttgcatcatcatctcatttatcggctaaggattttattaaacctccaagtattttaaatcaaaataatgatattaaactaaatttccaagcaaatactagtaattctaaaatgatgaatcaaaagaaagatatagaagttaagagacaacaagatgctagattacaacaaaagaaaaatttagaacttaaaatgaaggaagaactacaacttcaaaaagagaaggaattggtgaaacaaatgaaattaaaatctcaagaaagagaaattgctattaaaaagcaacaagaactgaaattgaaattacaaaaagaattggagtttaaaaaacaacaaagagaattgaaattgaaaaagcaacaagaacttaagttacaacaagaaaaagaattggaacttaagaaacaacaggaactcaagttacaacaacaaaaagagttagaactcaagaaggaacaagagcaactgcaattacaacaacaacaaaaggataaattacaaaatcttacaaaaaatattttcttagctaaacaaaagcaagaaactgtttcgagtatactaaacaaagcacattcagaatctcaaaccaaaactaaattagaaattatggaaactgcaagattaaatttaaaggcacatgctagacaagcaaaggaagaaagtaaagaacaaaataaagaacaaagtaagcaaaaagatactaatcctgataataaattaacatcaagagatgtcaagtttttaactgtatttggattatctacagtaggatggtggtcattagcagagtagttaattctgattcttttttaattctgcatttatatcattagtcattcattcattcatttatttacttttgttttaattttagtttttaatcgttatttggtttcttgtttttaatagattttttaaatatttaataaatcaacttttattttgtataaagggtacataataagattagtaaaggtacatattatcaacacaaccgaaacctgcagccacaccaccttcattacttgaacttgtcttagatcttaataaatgaccagctacattattatttaaaatttcaccagttttttcattaaataggtaagtaccgaaaatacctaattctgaaacaataccatcattaagtagttcaccatttcttaaaataatattattatgaattttaggatgaattaattccattaaaatataagcttcccattctgatttggggattgaattaaggaaatttggtatatcatctttataaatattattaccaccaccttctctttgaggttttaaaacaaaattatctggtttttcaaatgctaatttacgagctaataaaccatcattagattcatcaagtggataaattttacaaaatgtatcagttattttattaatttctaaatcattatcaataaattttgataagatatcctgtttagttaaaagttgttgaattttctttgatccacttaattgagttaataatgaaggacatttaattgataatgatgattctaaagttattctaacatcccaagtttcaggttgattaaattcagatggcccatatgctgatctataataaacaactgaaacttccaatccttgataatataatttatttgaattattttcatcaattttaaccattgataaaacatttggtaattctactctcttagttatgacattatgatttttcaataattgatattcaatagctctttgatcaaaagcatttctttcatttggttgtataatcattaaaacaattgatttattttcaccatttaaatattcatcattataatatttaacacctgtatataaaccagttgcaagtttttcatcactttcactaataactatttcattttctttataataagtcgagatattatcaccattattactatataacccattttgattaagatattgatgagttttaccaactttagaacttaacccaccaaatgatacactaacagtattaaattcaacttgtttaatttgattacttaattcatcatacatataatcagatctagttaatgatagagaaacatcttgtacaataccattatttaaagcctttaaataacaatcccataatttacctgtaaaatctttatcacttaatgataaagttttaattatgttagttaaccattcattttcacttactatattagcatataatttattataaattaattgaatatctaaacttttcaagaattgatcacgaggtaaaggagttggataaattgtaattggggcaagtacgggttgataatttaaatatggagcaggtggatacattattaatccattagagagaccaaattgagttacttcatagaccaatctttgcaattgctgttcattaagactagggaattctttcacgctcattttcagttgtctaattgaacttaaaagaaagatattccacaaaatatagaaatcaactcagatccagtcttcattaataatcatgttgaagattgataagtaggggaaatattaccaaattcgtaaaaaattgaaatcagtgcaccaaaagtttttcaaattgaaatttttgaaaaaaattggaaattgccctgtttattttccaaagagggcaattgaagcaaaaatgacacaaattgacatcttggaggctcttcctttggtgtttgcacctgtttcttctttcctttggggtggtatagagtcattggaatagctaggatatgtctctaaggttttctaaagtcctagggtcaatggatgatccaaatatggacagtttttctacattgaaacataaaaatgatttaaattcaaataataataacaacaatgatcaaacaaataatatcaaaattgaacattcagaacttcaatcaagaagagcaagaaagattgctaaaaatactggtgtaagattcccaaattttataacttctttctcaatgtttaacaataatcattcatctcaaatgaattcattaagtaaagatcaaaatgattcaactgatttatcacatttacctttatcaacttcctctcctataagtttagcatctcattgtattactactcaaatcaataaggatgattccgtaccttcattatatgaaactttatcaatgttccttattgataattataatcttaatttatcatctaaaactattgatcctttcaaaagatttgaaaaagtaaattttttcaatattcctcaaaaattattagattcaaataatgaatcaattgtcactggtatgggtatgttcccagaaattgaaagagcttggttaagtactgatgataaattatatatttggaattataatgcttcattcatagatcaagaattcgatattgttagtgatttcaatggtacaatcttaaaatgtcaattggttaaaccaaaacaaaaagtttttgtggaatctgttaattatcttatagttgttgcaacttcaaaggaaattaaattattaacacttgaatattctaatgataataaaaaattaattatttcagatccccaattatctgttacatctcatggtatgattattaataatattgtttatcatgaaaaatcaagagatatctattttacaggtattggttgtggtacatcagtttggaaacttaaatattcagaatcaagtgattggtattcaaaatcaatttcaaaagaatgtttaactgaatttagtttaactgcaaatttaccttcattacctatcttaaattggctgaaaaatgatacaactaataataatgttgaatatatcgttgatttgaaaattgatcaatcaagacatatcttatatacactttcatcaaaatcagttattcaagcttatagaattaataacaataaaattggtaatccaataactaaacatatctcaagtttattaaaagaattatcaactacttctccaattaatattagatcaccattacttaaaaaatcaaatttgaaattaattagtatacatcctgtaagcaaaaatgaaaataaaaatttgttcttagttgttgttgcttcaaatggttgtagattttatattaacggtagtacaatttatgatgatcatctaactcttacaactaattttttaaagttccctccaatgaataaagcatttcatgaaaaaatttctaaaagaaaagaaaatatgttaactcaaaatcaaaatattaatcaaaataataacagccaaaatcagtcatatcttgggaatcaaaattcaatgttaatgaatccaacaaaatctaaatataattcatacttcaactcatcaataaataaatcagttaaatctgataaatcaatcacaaaatcagtcactccattattaatctcacctgaagaactaagaaatgctcaagaaacctcagaaatcttacaaaatacttctaaatctttgataatatcacctggtatatttgttggtttttctgaagaacttggattatatacaagtactcctgattatggtatattcaaaaaggattcacaatatatagaagattttgaaattgaagataaattatcaaatatctttgaaattgttcaattaactgaatcatttaatcctgttaatcaaccattaggttatgcaaatgaatttgcttcacaatatactaaaaaacctttggaatttgcagttttatcaaatataggtatttcagtctatcgttatagaacaccagatttaattcttgaagattcactggatgatcaaacatttaaaaaattcgccttaaaatacggttctgatgaagcttgctcaactgcattatttttagcttgtaaatatgataaatcagaaacttttagaaatactgcaactcaatattttatatctggtggtaaaaattcaaaattagatcattcattatcaccaattattgataacgttgaaccaagtgatagattttttgctgttttattattattttcacgtttaattagaaatgtttgggataaagaagttttcaaattaaaatcagatatcaaatatgataaaatgggttatattgatgtacgttcaattaagaaattagagaataaaaatagtattttagaaaatgttaacattactaagagtgaattagaatttttattatgttctatcttaattgttattaattattttgaagataataagaatataattccaggattatccaatatcaataatcaaaatgaaacaacttcatggaaacaaaaagttagtgaagtttgtattcaagctgaacaaatatgttttgattcaatttctaaatttttaaacatagtcaaggaaggtttatcatttttagcaattttattagaagatagtcacaatgataatactgattcaaataatgaaaatttccaaaaaatcatttcattccttccaatccaattacaagcagatttaagttgtattacatttgctgatttctttactaaatctgatcctaatgtttccaaattaattaaagaactattatcatgtattattaataaatgtatctctgaaggaaattctgttgaattagttgcaaatactttacaagaaaagtgtggctatttctgttcaactgatgatgttttgattttcaaagcagttgaaagtttaaaacaagcaaaggattattctgatgcaaaggatatttcattaaaggaaaaatatttagaaaatggtattaaattattaaaacaaagtggtgattcattatcagatgaaataattgctgattgtgttaatgcaattttagaattaggatattattcaaatgctgttgaatttttattagatattgcaaatactcctgaattagtaaaactttcattacaatatcaaaatgatattcaaatgtcagttccaactgatataaataaaaagagatgtcatcaacgtaaactaaaactatatcatataatatttcaaattttaatagatgttgataagaaggcagtatcaagtattgaaaaggcatccaatgcttcacttattggatcaactaaggatgaatctcatatgtatgttgataatgaaggacatttagttacatattattctaaattaagggatgaatgttataagatttgtttaaattcaagtgataaattattacattttgaattatataaatggtttattgcaaatggtgttagtgaaaaattacttgttattgaaactccatatattttagatttcttaagacaagaatcttctcatgatttagaaatgagtaaacttttatggatttattattctaagaaaggtaattattatgaagctgcatgtcaattatatattttagcattatcacaatttaagattaaattagttgatagaattcaatttttatcagttgcaaatagttttgttcaagttattgaaacacaatttgttaaacaagatattatggaacttgcagctaaaattaatgatttaatatcagtttcaaatttacaggatgaattattaataactattttacaagattcaagagttggacaaatggctaaaaatattgccaaggatgcattagatggtgaaattttaacaataaatgaattatataatgaatatattgatccattaggttattatgaattagcattagtttgtttcaaattatcagattatagaaatcgtgaagatgttttatataaatggggatgtattttcgataaatggtttattgaatacaaagaaaaggaaaatcatgaaaatagtttgtttcatattgaaataatgaataagtttatattaattgctgagaaagttaaagatactgaaggtttatttacattaacagatttaataccattaattttaaaatctgtttataaacatcttgaagataaaagtcaaaaagttccaaagggtacatttattgaaattttcaagaagagtggtataacatatagtaaattatattataatttaaagaaagttatagagagtactacatttgaattatttgaaggttatagtaatgtattaaatgaagagatgtgttatttaattaaagattggtataagaatgataagaaattaaaacaaaggattaatcctgcatcaattgataaattggaaaaatacacagttaatgacgatccaattttcaattatattaaatctacaggtaatcctttatgattagagttgtaattagaattagaattgtatatttacatttatatttataaaagtatttacatttactgtattaatggtatctatgttttttaatctattatgattacttcattgtcgaaaggttttgatggttgtagtttcttttctggttctttatctttctctttctctttatctttctctattttaatgattggaaatagttttgactctttatccttatctttatcattcccatcatcatcttcatcatctgaaactaatgatacaatatcaactatacttaaactatcatcattaggtacatttttcaatttatcatcatcattttcagcacaacataattgatcatttcgtcgtctctctgcagcttttaacattaaatctcttataggtaaagtagtagaattaatattattagagccaagttttgatactttagttgtatataatttttgaattttattttgtgaaattaacttattattaaaattatttggataagaggttaaatttaatgattttttaatttgtaattccaaatatttatccttatattcatctaataatttatagaaaacattattatgaggaccttgagtattatgaactaattcatgtaacattgtacctacaatttcattagtatctaagaaccatttatcattattaggtgatcttaaacgtaaacaaattttaaaacctctgttaacatttaaacctaataaatgattatcttttggatacatttcacataataaattaacatttaaattataaaaatccattattggagaaactaatgatgcaatttcatgtaataattctaatgctttatctgatgaatctttatttgttaatgatgcaattttaataattcttgatgtgggaggtttcctctcaggtggtttctttttggggaatttacccctacctttaagtaccattgatggtatgtcgatgtagttacaaaataaaaagaaaagatgataattagaaaattaaagaacggatcatgtaaattatttttttagggtgaaattacagtgggggaatgtaagaagtacattacatactattattatattaattgattagtctaaatagataagagagtgtttataaaggagagatacgtaaagatactgattaaatacctctattaaaccaaacagatttaattttttcaccatttttatcttttaaattatgaaattcattttctaatgaattaggattaacaaatcttctttgagggaaaacagctaaagcaaaaggtaaagcaataagtgaagttgaaaaaattaaacctaaattagttaaagtaacagcagttaatgatttattttttaagattgatttttgtaattgaactaaaattaaaggaggtaaaaccataattggagttgcatttataactcttgaagcggcagtttcaccaactgcttgaaatgctgcctttttagaagtacctaaagtattaccattttcatcaaatactgatataccttttttaatttcttgacttctcattaagaatacattaacaataccagcagaaacgacagctgcaaatggtactaatctaccaaggattaattttgaattatttgaaatatttttcaattttggtacaattgaatttaaacctaatgcaacaccacatgaagcaccaactgctaagaaataatttgtgactaattgtttagttgataaaggatgagatttatttgcattagctgtattaactgcaacatttaaagattgattagcaatttgccaaaaaattgtacctgcagtacctaaaccaggagttaacataccagctgtaactactaaatttgataaaacacaacaagacattctaaatggtaagaaaaccgtttcaccagtatcaggatgaactgaagaatctaaaattttctttgcattccataattttggtgtcatttcaggtataacaccatttttataatcccaaattaaacgtttactttcttgaatatctttggaagttgataataacattgttggatcagatataccaatacaatgtttaactctaccgagataagtatttaaatcataacgagaatctggtaatgagattggacctggaacagatgatgccattgtctatgaagatatagttctataccaattcaaatcattaatgaaataccattagttgataaccaagtggaaaattcaagggtcgaccctggtgaaaaatttgaaaaaaaaaattttttcagtgagtgaagaaattattttattttattttattttattatggtaagagtcatatattttacattaatgtgaacaatttttttaataatttaatttaagaatatattggtttattactacagttatactacaataaagataaacccaatcgtaatttgagcccccacccctctcttaatgtaaacacaaaaggtaaacaaaaaattagaaagataaccttttttcacaacttgacctaatattatctctacaatccaaaacatcttatgcttagcggagattatattcatcaaatcaatcgttagagcattacattgatataaaaaacttaaaaattgattttttaagggttcttatctatgtagtgtcactaaggataaataataaaacacttacgtaacttatccataatctgacttgaccttcccaaacgagcaaaactatcctttcttatctgttatcttaatcacagtcttctacttcacccgctaagataatagctggaacgtatatacatgtgaatcattgctgtcttaaaatatttcactcttatttcttttcttttcttttcttcttgtcttcttgtctttagagcacacctattatggaaaagttatactgttccttacctttaatataatgtggatgcacgttgagcttactccaatgtattgtttgtattgtttgtataagcttaaattttttgttatcttgattattcgttatctgttttcaaaaaaattatttatcttatctattatcaaaaaaaaaattattcatctaatcttatctgatcacacttcatcttctattgtcttttcatatctatttatattcctctataatgcccatattacaaattatttaaccgctgttattcttaatacttgtaatatatatcactctttaaacaatgtcaaaaccttcattaacaacagggttctcacccataacttcagctcaatcaagaattcatgatattacaactggtgcttcaagtattagagaaattgatgctaaattagctattaatgatgatgatttattagctgaaattggttataaacaagaattaaagagaagattttcaactttccaaatcttcggtattgcttattcaattatgggtattttaccttcagtttcatcattgttaggtactgctcttgtccttcaggtgcagtttggtcttgggcaattgcttcttgctttattttaacaattggtattgcaatgtctgaattagcaagtgcaattccaacttccggtggattatattattggactttttattatgctcctgattctttaaaagttccattatctttcatgattggtatttcaaatacaattgccctttgttcaggtactgtttcagttttctatggtaatgcagaagaaattttagctgctgtttatttatctcatgatggtagctttgaaattactactggaaaaatttatggtgtatttgcaggttgtgttattacaggtactttagtttcatgtttatcatctaaaaatgttgcattattacaaagtgtttcaacttattataatactggacttttaattttattctttattgctttaccaattggaactaaaattaatagaggtgaatttaataatggtgctttcattttcggtaaagttgaaaatttctcagattggccaaaaggttggcaattttgtttatcatttatgacagctatttggacaattggtgcatttgattcatgtgttcatatgtcagaggaagctaaaaatgcttcatttggtgttccaattggtatttgtggttcaattacagtttgtggattttttggatttttcatcttaatttgtacaactgcttgtatgaatcctgatgttgcaacagttttagcaactgatactggtttcccaatggcacaaattattaatgatttattaggtagaagatggtcaattgcatttatgtcattaatggcagtttgtcaatggcttatgggttgttcattaattactgctgcttcaagacaaatttgggcttttgcaagagatgatggtttaccattttcaagtattgttaaaattgttaataaaaaaatgaaagttccattaagagcaattattttagcttgtttaatttctttagcaattggttgtctttgtttagcaggtcctgcagcttcaagtgctttattctctttaggtgtcttaggtaattatgttgcttggtgtatgccaattttactcaaattaacttctggtaaggataaatttgtacctggttcattttatttaggtaaattttggtctaattttattggttggactgcatgtacttggggggctttcattatggttttagtttgtttccctgcaactaaaattgttgataaaactgatatgaattattgtattgttatcactggtggtgtctggattttagcattaatctttttctttacttataaatataaatattatcatggtccaagaagtaatttacatgatgaaactgttgaaacagattcaagtgcagaagatgttgaaatgccacatgctgaaaaggtttgattaataattaataataaataattaatgaataataaataatgtatacactcaataaattgcttttataatataattttaataacttttaataacttttgatcttataatttggaatagactgaaatgaattgaagaaacttttcatggtccgcgtataaatggagcatgatttccttttattcatgatttacttcaatagatactctctttcttcaaggaataactagagagatacagtccagtgtatattgggtgttggaaacaacataaaatacctgagaggtgtgtgtcaatcacactgttcctcgtgagttctattttagtaatctaatttgaaatcgttattaaaagttgatgagagacttacataactgaaaaattacaagtttaagacaagctgaatttactgatttgtttattgattatacaattacacattataatttaccatggtgttttcaaagttactgatttcacaactcaaactgaaattcaaattgatgattatcaattgaaggtatctcttttagtaagaaaagaatgctctcattgtacaataaatttttgaatacttataatgatggtttgaaaaagttaaaacaactgggtattgatctagatactgttgaatctgtctctcgtcttggtatttctaagtataaggttttaactgatgcattttacaattgttttgataaaaatactacttatattaaaagatacaagaaagttagtactggtaatcctgttgttatgaatagaatttttaaaatcatttcagacatgtcttctgcaatgttgttaatgctccatttctctgctggtggtagttacagattgtttgagatgtcttattttaacatggataatttgggcactattatgaaaatatattaacccggtgatggtaaatcatatttacatattgtttctgcatattccaagaataaaaagttagaacctagagtgttgcttgtgaatgataaggtaactaggtacttcattcattttattttagctttgttcccattgaaaaaagatacaatgaaaaatctccgtttggatccctcaattaatgatcctgttcatgttttaaactttctatcaatgcaaatagtgaaattagttaatactgctattggtgatcaacaagaaggtttaaatgcaacaaaaaacgaattaagataattggttgatagattatccattaaattggtttaatgagttttattgcaaataatgaattctgaaatttccaataccgtaccgactgattgtgtccaattggaattgttgtgcactgtaagtaccaagtgtaattgcatttgaagaggtatctgtaagatgtttctgtcggttgcaaatccattgattgtcagtgctgtttcgatttcctttttcagcggacctcttattgacttcaatgcatcagataagctatagacttcaaaaattgttgagcagaagtacttaagtttcgacatggtattttcgataagttgctgatcagtgtatgagtagcagtgtaaataagtgtttctagctcacctattaggggacataatatgtcggagttgttaaatggtaattcaaatataaatggactatatctattggaaagttttacaaatgatgaagttgaaagtaaatttagaagtttattaccatctgaatttgattattttcatacaagctatagaatctttaggcatagagttttggatgaagatattcctaatatgagaaaccatttaattggtcttcgtgaattgtatgattggtttcccatattgagaaatttggaaagtaaaaattataaattaaatgattacttgatgattgaacatgtgtttaaagatccaatgtttatttgttgttttccagaacttgtacatttatcagctgttgttccagataatcaaaatattgttcatttatgtgcagattttgttatttcaatttttgaaaaaagagatcttgcaggtatgaagggtagattgatggaattaaatccagtggtgttgaaaaaagcttgtcattatttgaaggaatttaagatgctctcaatttgtttgattaaatattataaacaaaagatcattaatccaaaaagtgatgaaaggtggagaaagttctacaaacgtcatgataaaaagttaaaatcttatggatgggaaaatgaataccagaagaaatatccaattatcaagaagtttgttggagatccaatttttaaaacagcattattcattccaaatggaacttgcgttcactgttttggttcatgtcgtccatgtccatacacaaagatcgctaaggctgcaaaattgactgtttttaaattgtatagaatagcgtcaagatttgactaacaaccttttgtaatcagtgtccccttaatatataacaaacagtagaagctgatcaaagaaagaaagaaagaaagaaagaaagaaagaaatggaaattaggaaatgtgggattctggaaacttccactattaacatacgcgagagaggtataaatagagaagggtttcctgtattacttatgattggtgtatttatattctcttctttctacaactggagattcattcaattatatttacaagtcttgtttatattggcttatcaaacaagtgcacttatttatttgctttcagttggtagcaccggtgggaattctttattctttcaattttgaaaatatattagtcaatccttggaattgggaatttatctttgattgtgttattattcaggattctgtaatagatacatagtctcattgttccatctttctttttaacaaacaagacagggctattaaaaggactggcggatggcctgacgaatccttgagctagtagttcttcgacttgtttatttaattcatttttttcttgatggcttagtttttgaaaaaaattccatactgttgagagagtagcaatttatttcttcaatattagaaattccaaaaatctttgctgcttttcttttgatggttatgttatcttcttcatcattaatcaacttaccaacattagacgtatatgacatataattatcagaaaaatccgttttattaatggtattaaaatgacctaatataatcaaaggaattctaatgcacaacgtagcaagtgtgtgtcttcctggaataacgcaactcttgactttcttacatgttctttccattttgaaacaccaattctcaacaaaatttccaatatcttcccacttttctttattattaggtggacatttgagttgacactactttcaataagtgaggttgtgaaataaaatacataactgaatcgataatagtaaaatgtttagaaaatttcttaatgtttggtggaagtaaatgaacaattttgtaattgctttttcttatggaataaattcatcaaatctgattataaatggaaatatagaaaataattttgtgtactagtttatccagtatgtataataggacttctttataatttttaatctcttagttcaacttgttttagatttacctaactggtgaatgttttggattttaggcaactacttaaagtaacaataaaaatatcttgaaatgtcaaaaaatggaattttagtgttttaattgtaaaacaattttatgtaaaattaaagtgtttaaaataactcagataacaaataaaattaacctctatattaaatgtcacctctttttcatatactcacatagagtaactccttttaagcacttttcaaactaaatctttttttttttttttttttacattaatttcattagccgccaatttcaacgttgtaaacgtcaatacaaaaccatgctgtaaaacaagattcgcccgtgtagcgtaatggttaacgcgtttgacttctaatcaaaagattctgggttcgactcccagcatgggtgcaggcgaaatcttcaattatttttttaatttttagttgttttactatagtaatagatagtatcttactagatattaaagtcataaaacctattagatagactaatatagttatagtagcagactatattagtctattaaacatattcttcttatacctttttgcaacacgtaaagtgatgataatcttttcactgattagagaagaacgaaaaaaaataacgtttgtttacttttcaaaatttagtagaaattacatgcaccatgattttatttcaagttttatgattgttttaaataattatttgtttattgaatttgatttatatcccttgggcactgaataatgctaatatagaagagatatagatatacattatatagtttattaaaatgtcgcaagataggaaaaaatcaagttcgttacaagatcgatattttaaaaaacttgcaaagcagaaagatcaaaacagtctgagtaatatcaatgaaattgatgaaacaaataatgatgatattaatttagatagaccatttggaaggtttgatatacctacacgttcatattctcctgaaagatttaatacaagatcaaattcaacatctcctataagatcaccaaatagatttgataattatgataattatgataattatagaaatttacgacataatactgacattgatactaatttccatatacccagaagtccatcaccaacggagagacttattacacataattttaacaatgaaatagaaaatccattcataacttctaaaattccatttttaaattcttatgatacgaatgataatgacgatacaatacaattacatgatttagaggcacaaaaatataatgataatttaactaaaaatccattcaatgatcaaattgttgaatttaaatataatgaagttaataatagcaatattaataataataataaaaatcaattagattcagtatttcgaaattatagctttgatgatgatgaacaattagatgatgatgaagaatttactcctttccctgtaatcgaaaactcatattatccaataaatactccacgtgatgtctataatccatttgatgttgaatactcatcatctgaaggatctgacgatgattcctttgaaactgaaagtaattttgataaacaacaacaacaaggtagtttacgtagaaaagatacaaagtttaaaaatgcaaaggctattaaagaaactgttgattattatgatatggatcaagaaatgtcagatgaatatgaaaaaaatccatctgctaaacaagttcgtatggttgatggtaatttagtccttgattgtccagtttcagaaattttgttaagtaaatataaaataccattaactgataaggatagagagtttctatttatgagatttcaagcatgtacagcagaacctgaattattccaagcaaataagttctcattgagacaaaaattctacactaaaccaagagaaactgaattaatgattgtcattacaatgtataatgaaaatgaatttctattagcaaagacattaaaaggagttttcaaaaatataaggcatttatataatatgaaaaattcatctacatggggtaaaaatacttggcaaaaagttgttgtttgtattgttagtgatggtagacaaaagattaatccaagatcaaaggcattacttgcagcattgggagtttatcaggaaggatttgctaagaataaaattaatgatgatgatgttgtctctcatatttatgagtacacgacattagttggaatatctaaaatttatgatgatcatatcacattaacaacagataatcaaattccaattcaaatgatattttgtttaaaggaacaaaacaaaaagaaaatcaactcacataaatgggcacttaaagcatttgcacctatattaaatccaaatgttataatcttaattgatgttggtactgaaccagagaataaatcattatataaattatggaaaagttttaaagataactcaagagttgctggcagctgtggggaaattaaagctagtttaggtaaaggatggagtttattattaaatccactggttgcagctcaaaattttgaatataaaacatctaatattcttgataagccaatggaaagtgttttcggatttgtcacagttctaccaggtgctttctcagcctatagatatgaagcattattaggtgatccgttagagaaatatttaaagggagaagatttaaagaaaaataatgatgatgggatatttaatgcaaatatgtatttagcagaggatagaattttatgctttgaattaattgctaaaagaaatgaaaactggattttaaaatatattaatacagctggtgcttatactgatgttcccgagagtttagatgattttatttctcaaagaagaagatggcttaatggatcattttttgcagctgtttattcagtttgtaatttccataaaatttggttaacaaatcattcaattggtaggaaattatttctgcaaatacaatttttctatcaattattaaatttattagtttcatggttttcacttggatcatattttttagttttcagaatcttaagttgttatttagctgaacctagtattaatttcccaccaggtaatgttttatcagtttttttcctttggttatatatggcatcaattactacaacatttgttttatcatttggtaataaacctaagggaactaaaattttttatttagttattgttattttctttgctgtattaatgtgttatatgatttttgcagcagttttcctatcaattaaatcaattgaagaaattattaaacaaaataagacaagttttagttggatattattagttaaagaaacacaatttagaaatttattaattgcaatttcatcaacatatgccttatacttgattggatttatattatttttacaacctattcatatgtttacaagttttgttcaatatttattattatcaccagcatatgttaatgttttaaatatttatgcattttgtaatattcatgatatttcatggggtacaaagggtcaagataaaataaatgatttaggtattgcaaggaaaggtttatctggtaatgatgaattagaaattgttattccaacaactaaatatcaaattgatcaaggatattctaaaatggttaaagaattaatgacagttccaataaagaatgataatgatggagataatattgattcagaggagaagaataaactttattttgcatttttcagatcaatgacagtattattttggatgtttagtaattttgttttagttgcagttgtaacagagacaggaggattatcacaatttagtagtaaaagtgattcaaattctgatggtgggattttacctgcaagaaggacatttatatttttatcagttattctatatgttgttgcatttatggcattgtttagattgattggcagtgtggtttacatttttcaaagaatattaaataagtttggatttagaacataagaacctaaggatatttaattattatatacaagcatagattaaaaaccgtaaaaagatctaccagaatctttaatatcactcttcttttcagctaaagctaaaattctttccattttttcatttgtaaaaccatcattaatataataagattttgtacttttcaaatctttatcataagaaattaaattaacgaaaccaaatctacctctataatcatttttaccatttggaacaattaaactatcaactttaactaattcattataagttgtaaacccattccaatttaatttttccaatattaaagtttcattattaattaaattttcataaatttgaggttttgttgtatcataaactctccaaactcttgaaactactggttcgaaaagataagttacaatagggaatggtaataatgataatatagcaattaattgtgatatttcagtataaaccaatccagttctatccattaaataaccaaacatacaaccaattgcaccaaatgctaatgataatctctttgaaccaataacaaaattaattaaaggattttgataaattggtaaattactcaatctaaatttcttatcaagttttaaattatggaaacttgtaccatgagttctatacttaatttgatattcttcacctaaatttggaacataatattgtttctgatcttcacccattttaattctatcatttttcactgctgaggagtgaataaaacgggttgaaagtaagaaattagaagttattgacttatttcgtattcccaacctataacaagacatcatggctcttacttctacctctttaaaccgtgtataacccactaataaaagcaaaacaaaagcaaccacctacagtaaagtgatgtatcacaaaaacatgtaagcaggcaccgccaaaatggaaaaaattgaattttcgcaatggcagtggacatgaacaaattttttattttactttactttatttcactttgtttcttttgctgttttcctgtaggattggtactattatcacagctttgccttccctgattcaatagaggaagaacagaaaggaacaattttagtgtttgcgaaaataggttatttgaaattaataataagaaacattaattaattaatttgaaaagaaaaacataatggattccgcagattcaactaaatacgtgccagattacagaaaggcaaattttaaaaacaagaatagatttcaacaagatgaagttagaagaagaagagagactcaacaagttgaattaagaaagcaaaagagagaggaaatgctttcaaagagaagaaattttacaacaagtgatggatcaaatattaatggattaccagatagtgatgatgatgaagattcaactgaggaatataataatgatcaattattttatactcaacttcaacaagaattaccaattatggttaataagattaattcaggtaatttagaggatcaacttgaggcaacaattaaatttagacaaattttatcaaaggagaataatccaccaattgatttagttattgaatcaggtattgtaccaaaatttgttgaatttatgaaatctggacctgaagttttacaattagaggcagcatgggcattaactaatattgcatcaggtacaagtgaacaaactaaaattgttgttgatttaggtgcagttccattatttgttgaattattatatgcacaatcaccagaagttaaagaacaagcaatttgggctttaggtaatgttgcaggtgattcatcaacttatagagattatgttttaagatgtaatgcaatggatccagttttatcattatttcaatcaagtaaaatttcattaattagaactgcaacttggacattatcaaatttatgtagaggtaaaaatcctcaacctgattgggcaattgttagaagtgcattaccaactttagcaaaattaattttcagtgttgatgttgaaactttaattgatgcatgttgggcaatttcttatttaagtgatggtacacaagaagcaattcaagcagtttgtgatgcgagaattcctaaaagattagttgaattattaggtcatgagtcaacattagttcaaactcctgcattaagagctgtcggtaatattgtaacaggtacagatttacaaactcaaattgttattaatgcaggtgttttacctgcattaggacctttattaaaatctaataaagaatcaattaagaaagaagcatgttggacaatttctaatattacagcaggtaattcagatcaaattcaatcagttattgatgcaaatttaataccacaaattattaaattattaacaacaggagattataaaactaaaaaggaggcatgttgggcaatttctaatgcatcatcaggaggattatcaagacctgatcaaattagatatttagttagtcaaggttgtattaaaccattatgtgatttattatcaattgctgatattaaaattattgaagttacattagatgcaattgaaaatattttaaaagttggagaagctgataaagaggcaagaaattcaaatattaatgaatattcagttttcattgaagaagctggaggatcagataaaatttttgaatgtcaaagtaatgcaaatgataaaatttattcaaaggcatttcatataattgatacatatttctctgatgaaattgatgatatggcagattatgataatatgcaaccaaatattgatgtaaatggtcaacaatttggatttggagttgattcacaacttcaaaatggtggatttaattttaattaattaattaagttaattgaattaagttaattctatttttattaatttctttatattttttctctaattttattctttattacttatttttttcactcttctcttctctcctctcccttctcattctcttaacctctttttttgaattttaattaacttcaaatttaacttttataaaccttttcttaattaatcctttaataaattattatattacgtcatcagaaattatcatttcagtcacacgccacactcgccgcactgagtgtcttggaaataatttttttcatgcggctggtgaggtaataataataaattagcagtttaccattaattaatatactataagtattagattgtaaatattataagataattataaatatttgtttatgattaaacgaaagaagattagatattaattaaaattaattaaatagtaaaatattaaaatattagaaacatattattattattgttgttgttttttttcgataatgttaaaagtgaaagtaaggttatgatagtagagtagagggggatataatataatttttttatttttgaaaacttattaatattataattataataataaagcagcggcagcacaaccgactgcaccagcagaccaaccaatgactgaatttttcattgtaaaaggacttgaaattgcaattgcggcattttcttcaacaatagttgtagttgtaacttcatgatgagtattattgaatttaccaaatttatgagtaccagttgaagaagaagtagatgaaccttcatgatgagtattattaaatctaccgtacttgtgagtaccagttgatgaagatgtagttgaaccttcatgatgagtattattgaatctaccgtacttgtgagtaccagttgatgatgaagtagttgaaccttcatgatgagtgttattgaatctaccaaatttgtgggtaccagttgaagaagaagtagatgaaccttcatgatgggtattgttaaatctaccaaatttatgagtaccagttgaagaagaagtagatgaaccttcatgatgagtattattaaatctaccatatttatgagtaacttcagcacctgattgagtaatagttacagtagttgttggtaatttagcgtctgccatagcattagcatcaggttgaggaattgcagcagcatttgcagttgagagcacaataccagataataaaacggaagttaacttcattatgtatgtaaattgatttggctttactataaggaaagtgaaatttaaaatgaaaaatctataaaaagctataaaattcaaagattagagataaattcaagataaattgaagataaattcaaagattatagataaattagagataaattagagataaattagagattgtaataattgaaaataatcataatactatttcaacagaattgaacaaacagaaaatactgaaaaagtatattacctaatacataataaacagtaccggtgaaaattttcattggctgggaagtgttgcttccgttgtccgcgcacttactcttttgggcaataggtaaacacccgggtgatatttccatttccattttcattttcatttacccgcctccgccggttattgggcgcgtgttcgaatctggagagtggttgtattttacacattttttaatttaattttttaatttttttaatttgccctcgaagaaataaattagctgagccaataattgccctgtttcataatttttaatttaatttttttaatttttttaattttttaattagacgaccgtccagttttataccatttatttttgcatgactttcaatttagaggctcatttctgtttttaatttattgtttcaatattgatatcgatttattattaaacaagtactgtatactacattatatactttatacaaccgcttctataaatatgctgagtaaacgaaaaagaaatactcatgaagaagaatctaaatcacctgcaaattcaatttttaatccaattataaaaaggtctagaattactcgttcaacttatggttcagcagctgaattaccaatagttttagattcggaatctgattctgattctcaatcagattccgaatcaacttcaaatttagataatgaaactgatataacaacagattctgaaattattcgtagtagaaatactagaagtactagaaataaaaacaccaatatctataataatacagatatctcgatagactcagataatgatgctttactaagtggtagaaaaaaatcaagaccaaatactccaaaaaaatcttcaaatattaattcaacagttactcctccatcatctgcttcatcaaatatttcaacttctttaaattcaacgaaaaaatctttaaagaaagatatactgaaccctttacatttagataaggcaattttaaatcttgccgtaaaaaattctttaaaagatattaaactgaataatgaaaaaaatttagttactaatgataaagaagaggaaaaaattatgaatgataaaactttagaaaaaattaaggaactggaaaaacttgagaagcttaaaaacgaaaaggtggggaaagttgagaaagttaaagaggtagagaaggttgaaaaggttgaaaaggttgaaaaggctgaaaaggctgaaaagactgaaaaggctgagaaagttgaaaaggttgaagaggtagtagagaaggctgagaatgttgaacaggtagagaaagtggagaaaattgagaaagttgttgatacttcaaaggttgataaagtcgagaaagttgaaaaaggcgaggaagttgctaaaactatatcaaataaggaaagtgcagttgttaaaagtccaaaaaaacaacagcacccaaattcccttgcaaatttaacacaaaataaagccaaatctaatttagcgaatgatactaccatcaaagatactaaagatatcaaagacattaaagaatctaataaaacggatgaacataatttagaaactaattcctccaccactcccatcaatcctatcacacaaaatgataaattagcgactaacaataacccaattgcagaaattcaaactgttaaattgaaaatttcaagatataaattaaagaatccagataaacatgaaacacagaaatcaatagaaaaattaatttcttcgcgtttacaaaaatctgcgaaaaattatcatgattcaaaccccgaaccaaatacatcaattccaatatcaacccttaaactgaattttgataaaagagataagagacttcaaagtttgaaaacatcatcaattgataaaatccataacaaaattgataaaattgataaactcgataaaattgacaaaataggtaaaataggtaaaatcggtaaactcggcaaaatagataaaattgaaaagccagtagttttcgatccaacaactcacaaatcttataaagatatttattcaacaagttgtatatcttgtaccaaaaagggtagaggtgattattgtaatagacaacaaccttgtgatatttgtgttggtaaaagactgaggaaatgttattatccacctgatgcagaaattgtaattcatggagtactgaaaaaatccttgagaaataataatagacaagataattttattgataaaaatcttaaaaataataattcttcaacttcgaagaatgataaggaaaataatatggatagaattgttagacttaatctgagattgggtaaagatccaaagaaggataaatctaataaaaaatttgaagaatctgaaactgaggaagaatcagattcatcatcatctgatgattcagaggataataaaaataatgctgattcagaagataatgaaactgaagaattttcatcagatgatgatggttattattatgatcacccaactcgtaatggtaaaaaatatagatataaatatagttcaagaaaatcttcatcaccaagagataattttgagaaggctcaaaaattattaaaagaattagaatttgaaaaaagagatgttgatgtttattctgaaggtagaaggcgtagagctgcaactaggggtaattattttataccaagtgatccagataatgattcggatgatgatggttatgcagctgctgaagctagaaatgaacaaattattttaagtgaagacgaagaagagagaagaatgttaagaggggaacttgatatggaatatgttaataatttaagaagagagagagataaaaaggttaaaccaattgaagctagtgatgaaagtagtggtgaagatgatatgttctttggatagaacttataaattttcacatcctacttttaatatatttttagttattaaaaacgttcaattgagaaataatagattaagaccaataaatgtatgattatatcaggaatataatacaaacttatctattattaactcaattgaagtttttaaattgtataataaactgttttttgcattgctaccaattagctatccagaaggacaacaagaaacactattttaaagcactgtcaactgtgttttctggaaatgtttcaagttctttaaataaagggtatcattaattttgataacctagtaaaacccccattgcttacttttccttaagactggtagcaaaaagttgtagttacatgtggaagatctgctttttcaagtaagtaagatttaatgttccgtggtacctcaatattgagttgttacgtaacgtaattactcatggccagaatccgatgggctcaattagaagctgatcatagatatcgacttatcgatattctgctatttatttacaaaattctcgatgatgattggtcaaaaaatccttaaattaaaagcaatgcagaaaatgacctttttaaaaaaatcgatgacgtcatttatgagaaaaaaatattttgcgcgcattcgaaccttttatgaagatttttcaaatattttcgatagctaatcagtatttaatatctaaggtgctatattgaattcaattaaaagatcataagaagaaataaactatatacgaataaaaatgaaaaaaaatataaaccaagacgatctagaaggaaacaaaataaaatagcataataatttaattgaattaattgattaattcagttaaatatttatccgaaaaatcataaccacacatttcagcccatttaggttgataatcaaattttgaccattcactctgtaatgcattaacttgtaacattaaaccagcttccatatgccaaccaatatgacaatgaaatggaaaaacaccaggattatcaatgacaattcttaaaactgcaaatccgaaaggtggaactgaaactgtatctcttaaaattggatttgttaaatctaatctttcaggatgtttttcataaaaatttggataaaatgaacctgtcttagaatttgctaaaacccaaaatttataaccatgtaaatgaaatgggtgagcaccatcatcaaaattattaattaagaaatcaacaatcatatcacgtttatcaaaatttaaaatatattgattttcattaaatgtttgactattttcaatatgagaagttttattaaaattttcattaaataataattcatgcattgttgaagtatttgaaagagctctccaactataatcattaaaataagcaaatgacatttggttaccaccttccataaatgaaacatctaattcaacaaattcatcaggtctatttgaaccatttttattaattggtacttgattatttaaagttcttaattgatcttgtgggaaatctaaacattttggtgaaccaccatcataactccaagtttctttactttttggaattgaatattcattattataagaaataattgccaaaacatcagttgaaaaatcaggattattagttgctaaacaaaattgattaaatctagcatgaatccaaaatgaatctaaatcatgattagttctattcatgaaaaatgaatatctttcaccaactgatacatcaacataatcagaaattaaaggttcaattaatgtaccatcaacttcaattaatgataatttatgttcatctattgaaaatttaaaaggtaaaaaaaatccaacattaacaattctaattctataatttaaatttggatcaaaataagttgaagttttaaatttattattttcatcaattggtgtaaaataatttgttgattgtgaataagtacctgaaattaaacctgcatcaggtgttggttctgaattttcattatcaggtattaaataagttgataaaagttgatcagcatcttgataataataatcatttgcaacataaactctatcagcatcataattagttaaatttgaatcttcaattggagaatgaataattaaaggaccataaacaccatcagcatattgagtaccccaatgagaatgataccaataagtaccaaattctttttcaccaattggaattttataagtataatttaaacccggagcaattggacaaacattaattgaagatgcaccatcatcaaatgaattatttggataaaataaaccatgtaaatgaaatgaaactggttcatcatccattttatttaaaacatgtaaataaattgtatcacctgaatttgcttcaattagaggaccaggatattgatcattaataacagttaaatttctagttgcaccatttgcatcaattttaattaatgaagtaatattaaaataataatgtctatcctttgttgtattataatcatttctccaatactctaaatttgaggtataattattagcagtatctaatctccaattagttgaattattattattattattatcattatcattatcagtatcgatgatattaccatcaatatcttctttatgttgttttggtattatattattattaactttatgataatctggagaaagtgaggaattagaggataaattgtttaatttatgatgagatttagttaataatgtagctaataagataattaaaattaacgaagatgcaattattgtacctgaaataaataatttttttctataaaatggaacttttttattaaattttatattgtttgattcatttaatgaagcatcatcattatttgaatcaattgaatttctagaagggtcatcaaagggattaatatgatctaaattgtgtaatctgacagattccattggattgatgtagttgataaataaataagaatattttgattaataaaaactaacccattttgaaaaagatatcctgtcctatcacctttttattaaatgtaataaattgcaattatatacccaaatactgtaaattggatgtactgttataccatatcaatctttatctcgtgctgataataataagttaaatttaattattttaatatgtatctccacgtgggaaaatatagtcgtagaaaaaaaataataaaatttccgcgcttttctcttttcactattatactaattgaaaaattcaaatttcagcatttcatcagcgtcaggtcttcgatctctgttccacacgagtgtttcattgattaactcttcaaatttactaatatcaacatcatattcatttctaactgattttctaatatactccttaatacttttattcccggttattatattggatgttcggtttgttttcctctttaggtattcttgattaatccccccattcttatcaaatgctttccatagtaatgtattataattaatcgtattattatcatcttcgataataaactcatgtcttgaattcaatatgtattttctagatggtatatttaaatattgaattaataaaataaataattcaaattcagtttcaggttggaaaatcggtttaccaattaataattcaattgaaattaatccaattgaccaaatatcaatcttttgattatatttacatcccattaaaacttctggtgatctataaaatcttgattgtaaatatgtatattttgtcttaccattataacatgatgatccaaaatcaattattttaataatacctttattattaatcattacattctcaggttttaaatcacaatgaataatattttgtgagtgtaaataggatacaccttttaaaatatttttcattattattttgactaaattaattgaaaatcctttaaattcattaactttaattgcttcatataatgaaatacccgctaattctgttataatacaaatatgtgatcgaaaattaaaatgttcataatatttaactatattttcatgtcttaaattcttcattatcttaatctcttcaattgattgtaataaatatttaggattattaataattattttacatgccattaaaacttttctattctgatcttcaaatgaatgattaataactgaaataactgatccaaaggctccattacccaacattgattcaatttcatatttataatttatatgatctccaattataatcttatacttatttttataatcatcaaatccataattatttttagtgtttttcaaatctgcctttatcttaattgttttactaatacctgtaaaataaatattattagggaattgcataattctttcatacattgataaattactaaataatgtgggatttttagtactcaaatcttgaaacttatatggacttttcatatgatactctgccaattcattgaaatctggggtatttttctgatatttttcacatgtattgggatttccacttaataatttcactaattcatcaattgaatcaatttttgaatgttttggtttattatatgatgataatgataatctaatcgatgatgatctacttaaccttgatttattaacatcagtattcacttgacgatctcgtatattattggtatttattgaagatttattttgaactatgtaattaaattttaatgatttactcggtatatctctaacacttgatgatctaggtattttcgattgatttattgataatctcgataaattagaattattaatttcaattgttttcttactattgctcatcattatattggggttaattttggccttgctttgattttgattttgattttgattttcatcatttataatagcattcaaattattacaagatgtagtagataaaggtattttggataatgatgaatattgcattggagtataattaggtgctaatgacattctattcctttgcttatttgatctatgtgttatattgtcatttctactgaacccatttctacttatattattaccttcatcaattgtactaattgaagaatctggccttatgggtattctagttctatcattgcacaaagactgacgtctataggaagacgacatctgttagtttctcaaatgacaatccaatctcaaaggaatatataacataaaatgaacaaactaaaaaccttctttgtttcagatcgaaaaaacaaacaaacaaacaaacaaacaaacaatgtgaaaacctaaataaaaatttcatgtcgctatattaaattattaatcaccaaatttctcttagtttaacaatttgtccaatggcaacagaccaggtagtatagtaatataagaaggaaacaagactaaatgacaccacaggaataccctttaatactacaattagtactatgtgagcttgttcatgaagcaagtgcagattcaacatgggaagacattactaataaatttatgcaacgtcatgtagttataagacttcatcattcacttttgaatactttaaaaaaggaaataactcctcaaacgattccaagtatcgttacatcaatagtcaatcacacattacaaactttgagtaggagtggtaaacgagagtcagtggcgatggcggcggcggctcgtcaatacgaagaaataagtggggatcccaaacttgaacaattcataacttctggtaataaagaacgtgaatcccttgtacgatgctgtacaatcctgcacaatctctgtgttaaagatgtgaaagaagagatagaaaccagaaaagctcagtttagtaagatcctaaaagaggaaaaacttgtttaaagtgagagagagacagagagtctatttttttcatatacagagggatttctatagtagtagtaatatctttaatgtatagacctttctttagcttttctttagtaaagacacatattacagggttcttattgaatatctgatattatcattattatctgaaaccatgaatgatcctattcatgataagaaactgtcaaatactggttctaatagtaaaaatgatgaaaaatttgaaattcagaggaaattatccttatatgataatacattgaaaatggtccttgattcaataaagaagggagatttaaaggatggacaagatttacaatcattatttgttggtatgtcaaatgatttccaagttaataaaattattgatgatattaatataaataaaattcaaaaattgaaaattaatgatgatatagctgtctcttttgaacctttaaaatatattggagattttggaattgatgaagaattaccagataatattgttgatattaatgcaaatacaactcctgatgaatatattcaacaaatgattcaaattataaatcaaggtaaggaagaacttgaaaataaaattaattctaaatctaaaacttcatctgatagaaaatataatcagttactatttgatactattaatgataatatggaagcagctcatgatgctgctaataatcgtaataatgaacaaaatacttctaatgttccaatagttgaaaatgaagaaaagaaacaaattaatgaaccagagcatgaagaggatgatgacgatactggaatctgtgaatgtgatgaatgtaaaatttataacataaacgctaataaaagtaataatgataatgacaatgacaatgatttttctgttcaatttgataatggaagtaatactaatagcaaaaagattattaacaacaacagtaataacaacagtaataataataataatgccaataacattacaaacaataaattagttaatttacaaaacttatttgaagatgaaattgctgctgctattgcaaacttttttgaaaataataaacatctgttcccatattttaataatgaacaattaaaaatgttaacagaaaataaaccaagagtttctgttgatgcatttacaaaacatttaaatcaatatcaaaaagatcgttcaaaggcaataaaagatttaacatttgcagatatggcagatatggcatcatacgtttttgaaaaagaaatgaaagatcgtgatgttgatgtagattttaaatttcgattacaacatcatcaacaacaattggagaaacatcatcaattacaacaagaacatcaaaatttaaaattacaacatcaatattataaacaaaaacatcaacaattaatggatcaatgtgaaatggctaaaaatgatttaactacaaattcaaattcaaattcgaatccaaattcaagatcaaattcaaatccaaagataaattctagtgtaaatgttaattcacctcctgattcaaatggtaatattcatgtcaataaaaattcagatatatcctctaataatcaaaatcctcaaagaaaaaccaaaaagaagttgaagaagaagaaacaacatacaggacttcaatatattaatgataatcctactgatgaagaaaggaaaagattacaaagacattgtttacagatgttatttatgaatgatacaaataatgatgatcaacaacataaacaaccacaacaaaaaaagaaaaagaataaaaagaagaagaaaaatggtgtaaatacttttaataatgaaataagtacaattaatcatgttggttataataatcctgcaaatactgattggttatgtgaattatgtgaatataaaattgtttatggtgaaataccaatatttttaactgaatggttacaaaagaaagctaataatcaagaaaaaatggaaaattatcagagatatttattagcacaaaggaaagagcttaaaagagagcaattacaaaggaataataattataatgataaacataattttaatcataaccatcataatcatcatcaaaattgtgaacatgatcgtgaaaatgaacatcaatatgaacacgatcataatcaccaacatagtcatgaacataatcataatcataatcataaccatgaacatgagtgagtaaggattaacacactgaaaaacgattttattatgatgtttttataataatgtatactcaaatttataataacatggttaattacctaccaatcttgaaatatgttccatttccactaattcatttgtagaattttctaaatcagttttacttttactatcctttaattttaaactattcataattaattcatcagctgcatcaccatctaaaagttctaattgctctttaggaaatattcttggaaataatattggaactaaaattaaaattaacattaaaacacctgggaatccaattgctcccttagtacatgtaatactatattcacctgcaaatgcaagtaattctaataccacgtaaattttaaaatattttggatcagttttgaaatactcaacagggaaatctgcaggtatgatatgttcaatttcatcatcagattgggattggccattacgattattatcgttagattctcggcaagtgctattaacttttttaacggtatcattctcattatcgtccctaccaaaatttgattctaaactgttacagttatcatcaactccatttacgttattctttaattttgttttattatcatcatcaataacgattttagataatttagttttccatagatcatcagtaaatataaatcttaatcttctaacaacatcagttccatcaattgttgtaattgccataatccaaaataacccagctaaaacaccttgaggaatcaatcctaaaacaaccaaaaatggacgtgtcatcataactaatgtaattaatccttgaaatgtattacttaatctttgttcaacaacttttgtaattttattaataccagttttataatcatattcataaatacataatgaataagtatgtaatggagcttgaggaattaatccatttggagctgggataccaattaaacctgctataccagtagtcacaccaagtaagaaaaaatcataatggaaggaagcaggttttttcaatgggaattcagatgattgacacattaatgatgaaatattatgatcataataaaataaaattgttaaaagaattgcaaatggtatagctaaaaagacttgtccaacagttatatcttcccagaaatggatcaaccaattaggacctctattaattgtatcagttggatggaaacttttagtaattggtaatctaggaaatttaacatcatctaaacgaccaccaaaatgaataaaccctgtaaagaaaataacacatagaggtgtactataatctctaataaatgatctaatattatgagataaataatgtgattttgtaccaaacatttgagcagaaattccaaatatagccattattaaggcaagcattattgatgcaaatgcaccagctgtatcagttaatgagaattgatgagttaaaatttgaatacctttttgaatataaactatattaataaagaatccgaaaacatcacatgagaatttagtaacatatctcataaaattaacactattagtaaatgctaatataaaatggaataacattgaccataagcaaatccaacacatgaatgggaaatatggtatattcttcggtacgacaatttcataaactgtataattgaaaatagatattggacctgtaactccaacaatacataatggagatcctgcgaaaagtccaaacacaataccacccattgcagatgcaagtaaaacttcattaacaccataagaattattagtatgatcaaacatatcttgtgcaaatgccaatgcaggcaataaatttgtaaagaatatgtaaactgtggatggaattgtacgatatgttaacccatcctttatatcagatacataatatttgattaatctatccttgatatcataataaattcccttcccagtgtctcttaaatggaaaagctgattattcttgtatgagttgattctttcattgtaccatgcagtaaatgacatgaatatttatactattaagcgtatgtataatgagaataagaacctataatagattctttgttgaaacaagtattcaactctactataaatgactgtatataagatatacactatattaaaattcaagggcttggaaaaagagataggcatatgtcatgtacatgaaaatttaatgaaatgaaaaattaatttttcactattattatcagtgatacatcctttctttatttgatcaacaagcaaatgttacgtggtattaagacatccaactacattcttcaatcgatcagatggaactccactaatggaccagtagcaccatttgcaactccagattatcaaggtagaaaacatgttacatttgataaaaatatgccatcatatactaaaccaaaggcatgggagagagatggacaagataaggaaaaatggtttaaacgtaaacatgcacatcatcatatattacaaaaaccacaacgtgagaatactcaacgtaggtatgatggtattaaaaggaaaaatcatgaagaaagaatggaaaaagttaaagaaatggaaaaaataagagaacatagaacaagattaagacaaattggttcaaatcctaatattgatatgcttttcggtactaatgcagttttagcagctttaaaaggtgataaaagaaagagatttggtaaattatatattcataatccaaaggatagtgaaaaagttaatgaaattttacatttagcaaatgagaagaatgttaaaataacggaaacttcaaagcaagatataaatcaacttactgataatgcagttcataatggtattgcattagagacaaaacctttagaaataacagaaattaaaagtatgagttctaaatttgatgaagattcctttaatattaatattagaaatgaaatttctaatataagtgaagataaggaaattccattagatacatttggtaaaagatatccatttggtatttatttagatgaaatttcagatccacataatgttggagcaattttaagatcagcatatttcttaggtgcagattttatcgttttcagtgaaagaaattgtgcaccattaacaccagttgttgcaaagtcaagttcaggtgcaatagaatttttaaatttatttaaagttgataaaccattaacatttttcgaagaaagtaaggataatggatggagtttaatttcaacagttgcatcaactggtaaaaataagaagaaaagttcattaattgatgcaaatacaattaatgaaatgttacaaactcaacctgttatattagttattggatctgaaggtgcaggtattagaactaatttaataaatagatctgattatttagtttcaattgaaagtggtagagaaatgaatgaatgtgttgattcattaaatgtttcagttgcaacagctttattaatttctaagatattaaaataacggggaagggaatgtatttaataataactagaacatcttgtaaataaatagaatatttatcatgtatagtattcacctaatataaaattaattttagaatagtttttttttcttatatacactatatacaatatgagttctataaataatagtattagtatactaatactatcaatttttattagaagtttcttcattagcattaactttcaataaatcaaggatatctctcattaatgaaggatcatttgcaggtcttgaaactgaatttttcatttgaatatttgatgatgaaattttagtgacaggaacggcatttaagtttaagtttttattctttaaatttaaagttacattatcaattaccaatggtacttgaacttgtcttgaaaatttattttcatcaatcattttagtttgagatactaatgattcaacataattatcattagcagcttgacgtgttatatttgcaataaacccaccaattgcagcttttgaacttgaagaattattaccaacaattctaccaggaacaactctatttgatttaacaccatttggagtttgaaataatctaccctttaaagtataacttaaacctgcagtacctgataattgattataagcatttttaggaatttcatttttatttgcattatttgataattttaaattttcagattcaataaaagatttaaaatatgatgataattcataattattagtaatttgaatattattaattgttaaccatttaaggaaaggttttcttaaatttttcaattcaggtttaatatttttaataaaattaattgaatttaatggttgattagtaatatctaaggtaccagaaattaattttgattttgaaaattcttttgaactttcaaagagaggattttcacatttaagtaaagaatttaaaatatcaggatcattattatttgaatcattattattattattattattgttgttgttgttgttgaaaaatctttgatttttattattattaagattattattattattattatttgaactttcattatatgaagcatttacaggtatacctaattctctaaatctcttctttaagaaataatcaccattaagagtttcaaaatttggtaaaccatatttattatctaaatcattaacaataattcttctagttttaattttttttggaattctcatctttaaaccgaaatctcttctagagaatgaatcagttggagcttcaataatttgatgagttggtaatgaactatttgcatttaatatactatcaccaattgaattttgtaattgaggaattttagtgtttttaaacaatctgcccataacggacatacttcctgtactcttggacattcttgagggggtgatatataggacttagaaggggagatcaaccacagattaatgaatattataaatacctattcctctatatacctcctacattgaaattgaaaaatcatgaactgagagagagtgaaatttaatttttgaagaagagaaaatctcaaggaaagttaccctctctttaaaatttaaaatgaggaaaaagtagacgcatcgacgctgagaaagagggcaacttgcccttttttaaattattttattttacgttaaaatgctcagccgttgatttaagtgattaggttttagtaaggagtatacacttcttgatttgcttttcaaaaggtatcagggtatattcatattaatcaatacatacactggatcagatccattaaggaagtagaggagttgagttgagttattttatctacaaaatctattcacaatctttcatcaatgtcgtctaagaagagcgtttctcaaaaatataaacttctagaagtcattggtagaggtaaatttggtacagttcataaagctatcgatgttgatagtaaacatttaattgcaattaaaattttaaatttagatactgataatgaagaagttaaagatattcaacaagaaattggatttttatcaaaattaaagacagctccaaatataactcattattttggttcttatttaaatggtcataaattatggattttaatggattattgtgctggtggttctgttagaactttattaaaacctggtcctttaaatgaaaaatatatttcaattatttctcgtgaattatttattgccttacaatttattcatgaaaatggtgttattcatagagatattaaagctgcaaatattttgattagtaaagatggtaaagttaaattatgtgattttggtgttgcagctcaattaacttcatcaaaggtaaagagaacaacaatggctgggactccctattggatggcacctgaagttataagagaaggtgcaacatataattcaaaagctgatgtttggtcagctggtataactatttatgaaatggcaactggtaaccctccctatagtgataaagatgcattaagagtaatgcaaataattactcaacatgaacctcctagattagaaggtagacaatatagtgcattacaaaaggaaattattgctctttgtttagaggaagatcctgaattaagaccatccgctgaaactatattaaaatcaaaatttattaaaagtagtaaaactttaccaactacaacattaaaggaagttattggtaaatatttggtttggagagataatcgaaataaatcaatttcacaacaaaataattcaaatttaagtaatacaaatttagaaaatgctaatgtcgaatcaaatagattaaatataccggaaaataaaatctctcatcatcaaactccttcaatggtatcattaagtgaatcttatataagtatggatgatagtgaaaatattaaatgggattttgattctttaaaatcaacagaatatattattgaaaatgatattgtattacaaaatgatgataattttaaatttgaagattcagaatttgatattaataataatcatgcaacaaaagattttactagagattttacaagagattttacaacttctccctataataaaactttcacaattggtaatactttaatgaatggaatacataatgattcaagaattacaactgcttctggtacagcatcagcatctacaactcagatagattcaattattaattcatttgatcaagtacctaaaataattaatccacctaaatcacttgttgatttattccccgaatctagtagcaacaataataataacactaataacaataattatagcgggatttataatcaagattcaactaatagtatacatttgaataatgcaatcattgatagaaacacagataaaaatataattgataataatgatcatccaaatggtttcaataataatgaaagaaaaaattcaagagttgaaatacagaattatccagaaattgatcataatggatcatattatcaacataatgatgaattaaagaaagaactattaggaaataatttatcatttaatcaaatgagacaacctcaaataacttctccattaatttcgattgaaattccaaatatggataatattgaaaatgaaatccaagaaagggaaaagcaaagatcaagagctgcaaccgtaactttaaacaataacaacaataacaacaacaatagtaacaataatatgaacattaataacaataatattaacagtaatagcaatacccatattgttaatccaattgataaacctgatctgggcacacatttaagatatgaatctgatcaaccattaccaatgagaaaaccaacaatttccttagcatataatagaactccatcacctgcaaggatgttagaacaaatcaatacaaatttacttcctaattcacaagaacagacaagtccattacatatgaaaccattaccaattagtgctcaaccattattacaaccaataaatggaactttaaagggtaaaccacaaatcaatttatcgaatatttccaatcataaagcagtttcaaataatggtccacaaactgctcctgttgtttcatcatcgaatgctgaattatttgattctgctttgaaatcacgtaatcaaatgcgtatacagatgccagtacctatgtcagcaactgcttcatcattcccaaacataaattctaataataataatattattaatagtaataatactattgaaaaaaatcaatttggttttgaaattaattcagcttcaactgttccaatggcaatgacaccagttactgaacgttcacaacttggtcattcaacacctgaaaaagaattatataaaagagagatttcaactgaaggacattttaataattcgaattcaacaaattcatcattttcattaaatactaatacaaatactacatccaaatcaataaattccgaaaatattatgaaaaatgaaccaactataaagaagattccatcaactacaaaacatgtaatcagtccaagtagtaatttgaaaaatagtgtaaaatcaaatactaatatttcaaatatgaatataaatatgaatttacttggtaataaattaaattcggcgagtgtttcaacattgaattctacaaataatagaaataatgattcaacaacaaatcttgaaagaaagatgtcagttgactctaatcttaaatttcaaccttcattaatatacccacagcaattaaatcaacaaaacaacgaaaatgaaaaccctaactcattttctaatcaaaatgatggtagaaaagataaagataaagagaatgataatgaaaagactataactggattaggtatgatgagaatcaatgatagtggaaatgtatcaccaatgaaggcagcaaatcattatgataataaaaaggaatacacattacagaaatgtgcgaaatcatcccaaaagagtttagagaagatatccaatcattgcattactttaactggtattgatacgaacaatacgttatctaatgcattgtacatcaatgaaattgagagtatgctggacaacatgaacagtgtattggatgttatcgttgatgaactaaaatagggtatccgataagcgacaagttaaataatttttttgtgtaaaatagacgaaaaaacgggtgttttttgaaaatgttttttttctttttgaaaccattcagattatgtaaatttactagattaactataactgtaattattcttcttctttaattgatgataaatgatggtaaaattggggttattttctcaaatgatttaagaaatgacgatacactcacccagaggaagttatacacacgattggagttgaaatcatctgaattgttgaattacgagtttaattttaatgatccattgtatgaatacgttaataatggtaaaataactttacaaaatactgatgagatcaatatttttaacaaatttaacattgagttagatatattagacccccagtttaatgatattgtacaatatcatgcagaaattaatgaaagtataattgatcaaataatgaataataatttattaatagggattaatcgtgaaatagttattatatggatattaggattgttaattaatggtaaatatgatattgaagatagatataaatttgaaatatttaatgaaaatggtaattattactggaatattagaattttcaataatggattatttaaaatattaacaaagattactttaaataaggtagaggttaatttagatgatgttctccttaaagatttagaatatttttataatgaaaataaattatttaaaagtaaagaaagaaattgggagttagaaaaggaaaaatttgctaaaaatatatttttaataaaggagaaggaacaattgaataaattaaaagatagtgtaaggaagatgagaatgcaaattagtggatattttgtaccattggttaattctttattaaaggagaataaattgttaaagggggatactggtgatgttatattttcaagtaagaaaagaaagaatgatatagaagagatgaaacaagaaatttttaaagaaatggaaattggaattaataataataataatgaagatgatgaagatgatgggggtaagaaagacaagtttttagaattggctcgtaaggagaagaataaaagaaggaagttggaaaaggtagagaatgaaaaagtagaggagataaaacctgaagaacacgttaaagagacaaaatttgcaaataatagtattgatttagaagatgatattgtatttcttaacaaaagagaacatcatagtattacagagacacaatctgattttataacggctaattgtgaagttaatgaaagtatacaattaattacattagaaaatgatacacagattgatgacgatgaggatgataatgatgatcaaaatgaagatcttgatcaagatcttgatcaagaaactgatatttctgactatttaattgaagaaaacatagaatctgatgaaaaaactgattattctactgaagtatcctcttcaggtaatgaatttgattaatataaaactgaatggtgggtatatgagatccatcttttactataactatttttagaaacatattgaatatttttaccaaattttaacagaccagctgatttattaattgatgatatctctgatttaaaatcaattagatttaaccaaggtttattaaaattctcaattgatatattatttggtaaaatattatcaattatattattcatattaggtaatggatcatttcttgattgtaaatcaatcattgaacagattttaaatcttgatattgaagctaatttgattaaatttatgtattgagaatctatctttttgaaaatattggaattttgtaatgattcctctaatcttaatctaaataatgaatcaaataaacaattatttgatatacatccaatacattcaatacattcagcatatctctctaataggatatcatcgaatatatcaatttctaaatctgaaatatctttaaatatattgtttattcttattgaattgatttgagcgtatactaaaaggtatttaggattagttctttgctctctcatatatgtagttttaccatttaaatgaattggaattcttatattaaaatctggaagggtggaattgatatttatattattgtcatattgagttggtaaactttcgaatttttgtgaaaatgtttctaatggtatatcttgaaatattttcatgttattgaaatgattggaaaccgaataagttaagttaaatgaattattaaaattatgaatacaatctgatattgaaaagttattatcattattattgttatcaattgtgggtatactaatggtatttgaagaattatttattaaactatctgtgtgaagttcaagtgattgattttctagttgattggtattatcattttgagtttcatattcattatgattatgattattatcatcatcataatagctgttctttcgtatttgaagaggatgataattatcctccgttaggggacaaacggatgtaaaggaagatgaatttgataatggatcttcaccattcaatataaaacttttttgaaaatttgaaaaagaactagcttttttcaaagaacaagtagatttaaatgatggtgttataatgggggatattgaagtatcattataacttgaaactgaactttgtcttgatgaaagcatttgtgtataagaacttgaaaaacttgaatgtgaagtacctaaactacttttccttcctaaagatgtggctgctatgttactaaatgtgaatatattttcatcctctataatattttgtgataaacctttcccattaggtttaacacttatctgaatcggagatacttccactattggtgtgggtactttaactattccctccatggcgtccaagaaagaaagagtgaacaaccaaccaacataagaatatactctaagggaaaacttccccgagataagcgacgttgagatcggaattaccgaactaagaaaaagaaagacgccaatacttaaacccgcactctaaaacgcagaaaagcttctctggtgctaatttagtgccattttcagtgaactagtgcttctttaacggttttttctttttagcttgggtttatgggtgttcttcgtagagtgttgttgaagagtaaggacattgatgataggattggattaagtgacacccatttcacatttcccaagaggaaatacggtactcaacagaaactgttaggtcaaggtgtctctggatttgtacacttgtatcaaaatgagaaatccaacaccttctatgctgttaaatcatttgaaaagaagaatttgaaagatattgatgaaattaaatcaattaaaaaggaaatagatattcataatagaattaataatggtcctcatattgttaaattaattgattcatttaaaataaagacaaattctaaatttttcataattatgcaatatttaccacttaatttacttgatttatatttaaaatatggatatttaatgccaatttcttacagattatgctttttcaaacaaattgtattaggaatcgcatttatgcataatcaaaacattgctcatagagatattaaacttgaaaattgttgtgttgataataatggcaatgttaaattaatagattttggttcttccactattggtgatattggttacggtatggcaggttcaccctcttattcttctccagagatacataattctttaaaatataattcaattaaatgtgatatctggtctctcgggatagttttaattaatatgttttatgcatctaaacaaaaatggaatacttgtagatatgatgatgaaatcttctcatattatcaaaataatccctctattgataatgctgttaggtttttaaataaaaatgatactaataatgttaaggagtatacttcccaaaagaccttaatcgatgatataatcttacaattgttgtccattgatgtcaatacaaggatatctatacagaaattattagaaaataagtggtttaaagagacagagtgttgttatcctgataatgatctatataaggcttaccacaatcattcacagtttgtataatagtaaaagtaatagtaacaataatagtaatagtaatagtagaataatgatagatataagccatgaaacagacgtaaacatggtaacaggtaatttttatagtctcgaattgtcatacaatataattttattattttatgttgatgatctgttgatttatttcatttcattcagtaaatatacgtagtgaaagtaatgaccactgctacttctagtgctgatctattgaatgaggataaagttaaatccattctagcatcagattcaagttttggaatcttatctcaacgtttaaagcaaagtattaaagcttgtgatgaatttgcttcatttattgctagaaaatgtcattctgaacaaagatattcaaaggatgttttaagaactgttaatcattgtgatcattcaataacttcaaataatattgtagttcaaggtacttttattcaaaatttacaaaaagttataaaatttgatgaaaagataaatagtgttagagatccatatatctccgcattacaaaatatggcaaatcaattagaatctttagttcaacatttcactaatattaggaaacaattaaaggaaaaaggtaataaggcagagagagaagtttcagattctattaatatggctaaaaaggctagaaatagatattggaatttatgtactgaattagagaaagttagaggttctgataaaaatcaaactaaaattactttacaaggtcgtaaaacttattctcaacaagaagaagatttaaaggctaaaattaaagatgctgaagatgattataataaaaaagcaaattcatctcaaagattaaaaaataatttagttaaaacaataagaccaaatattgcagatgaatttaaaaatttgataattgaactagattatgcaatgcaaattcaacttcaaaaatattcaatttatactgaaagtttgatagttggtatgggtaatcaagttaatccaattaatggttcggattcaatgaaaaaaattgcaacaagttctgatcttgaaaaatgtttatatttttatttaaaaggttcaactgttaaaactaatgatgctttacaacctgtggaatttataaggcatccaattgttggtggtatattaccaaaatcaactccaaaaccaccaaattctgctaatgcatctcgaatgaataatattaataataataacaataaaagagatatgtctattgcatcaaaatcaacagttagtggtggtgcaacagcagctggaatggtggctggtggtttaatatcatctactgtttcatcacctaatgattctgttaatagtaataaacaatcacaaaatatactttcaatgaacactaataataaattaccacaaataccatcacttggatcaacagattcattacctccagttccagttccaccatcttatacatcattagatccttcaagtagtccaaaattaagtggtccaagaccattaaattcagaaggtaatgattcaacattatcatttactgataatagtattaaatttaattcagatatttcaactaataatattttaaataatgggaaattatttggaactccattagaattattagatgcaaatgatgaagctgttccattatttgttattaaatgtatacaaataattgaaacttttggatcaaatactgaaggtatttatcgtttaagccccaataagatatcacttgaagaattaattatacaaattgataatgatccacataatttatcattattagatccaaaggatccaactaatatttcatctgaatatatttatataattgcatcattattgaagaaatttttcgctttattacctgaaccattattaacaaatgaacaacgagaagcatatttacaggcagctgaattacccgatccaatagagagacaaacaaagatacatcaacttgttttcgaattaccagattcaaattattttacattaagagatattttaggacattttagacatttaattgaattcccaaaagttagaatggattctaaaaatatttcaattgtttgggcaaataatttaattggtggtaattttgaatcaagaggggaacttgaaattcaacaaagagttattgaaaatttaattacatttgcaccttcgattttcacttatgatgacatttaaattaaaaaaaaatgttctcttatactatgtatttataaaaaattctattattattattaatagtattatataaaaacatttcaattaattatcaatcttacgtttagctctttcccaagcactaattctctttcttttctttggttgaccatcattacccccaacactcatattattttcaaacatactccaatcttcaccaaagaattcattacgcattctctttgcacgttctcttttattttcctttgttttagttgcaggtaatcttgtaaaattttcttcttcataacgttgtatctctgcttctttttccatttgtttctttgatttaatatctctaccattgtttataattgttgaaccaatagatttatcagcaattggtgcatcactaatatcttgtaaatattcatccatactttgtaaatttcgttgttttttagttttaactggtctatctggatcattaattgcagttgctgcaatctttggtggtttatatttttcattagatttatttgatttaagttcttcctctccttgttcaagattagtttcagtttcatgttcttcttctaatttagcttctgccttctttgcaatcaaatgttgtttattactatacaataaagcggatggatttggtttaaaattcaaaccattttcagcttcttcatcctcttcatcttcttcatcgtcatcatcttcttcctcatcttcattatcttcatcattatcttgttccttcttttttgcatcaatatcatcttgttctttttctcttctatgatatgcactaaccattttttcaagttgataacttgttttcttttccaatgctttaatacctttctctaaaacaatacgattagttgcagcagaatttaaaacatcttctttatttgattcataaactgagtcgcctttttcctctttaaaagattttaaacgtaatgaaaggtataatgctaaatcagtaacataattaagtaatgaagcatttttcaatgataaaagtgaaacagaatctaaatctgaatctgaacctaatgttttcaatatggattttattaattttggaacttctttattatctggattgaaatcatcttcaagtttatctaaaactagtgatgttgaatctatagattctgcaattgaagataaaagatcatccaatactacgggttgttgtgattttgacatttccttcaataaataggatgtatgatgttgaataaacccaagaaactattacaaaacagtaaataactacattataaatttcacaataatcattaattataattctcttagagacaaaaaaaaatatttgaaatttcatgttaaaaaaatttttcttttttaagaaattttttaatcaaaatttttttacttagtgatttctattgattaaggtagttaaaatatttctattttattgtcttttctttggatctttcaccttttaagcaaatagatatcaatcaaacatgcctcaaaacgattatatcgaacaacatatcaagagacatggtagaagattagattatgatgaaaagaagagaaagaagcaagctagagaatctcataagatttcaaaggatgcacaaagtttgaagggttggaagggtaaacaatttgcaaagaaacgttatgcagagaaggttgctatgaagaagaagattaaagctcatgaagaaagtaaattacaaggaccttctaaacctaaggaagatgatggtgaagcattaccaacttatttattagatagacaacaacagaatactgcaaaggcaatatcatcatcaattaaacaaaagagaatggaaaaagctgataaattctcagttccattacctaaagttagaggtattagtgaagaagaaatgtttaaagttattaaaactggtaaatctaaatcaaaatcttggaagagaatgataacaaaacatacattcgttggtgaaggttttacaagaagacctgttaagatggaaagaattattagaccttctgcattaagacaaaagaaggctaatgttgttcatccagaacttggagtaactgttttattaccaattttatctgttaagaaaaatcctcaatctccaatgtatactcaaatgggtgtgcttacgaaaggtactattattgaagttaatgtctctgaacttggtttagttactgctggtggtaaagttgtttggggtaaatatgcacaaattaccaatgaacctgatagagatggtgttgttaatgctgttttattagtataagacaattccaaatttcatttatcttctctctctatctatatctctttctatgtacatgtataagtttgaattttaaatccggttaagtttttactatataagaaaccaaaaaaataagtattaaaaagaaagttattcgttaatactctatcttcatcttaactgctaatcaaaaatatctttaatacaagagcacggcgggactcgaacccgcaaccatccccgccggaagaagacatgctaaccattgcaccacgcgccctcgtacacagctcgggaggtcatttaagacataccctcagtttttcaacttagcggtcacgtgatctatgtgattatgtaagcagattgatgatgatagtgatgcagctgtatataaactaataaggagttttctgttttaccaggttaccgtaaattttgtgatcgccagctaagccgtacatagccagacgctaccagttacttgttaaaatgctggcttaatacaattgtttatgtattatttgaaacactatttctagtcttctttctctactactgcttaaaatgaaatattgtagtatcatatcttataattgaggtgaaaatataaatttgtattttaaaaaggtgtcattatttggattagtgatgaataactaaaactagctcaacttttttaaatttgaaaaggcgtagtttgaatcaacttttttatttctttaaaaataaagtttacgtttcctggcatctctgaattcactcgattaatatatttttcaataaaccccaacaaaattggatactatattagtgtaaaaaggtcttttttacattaacttttcttgtaaaaaaaatggcttaaaaaaagtttttgatgttttcaaacattaatcagctttttaacctttaaggaaatgaaaaaaaactaaactgttatattggaatgtattaattagccttcaacaataaaatttagatttgacacatataaagtaaaaaatactttataaacatgctaccaataatgtttttttaagaaaacgtcattatttttataaatcacgtgactacaataaaatctatctgaaaaagtgttattttttattgtcaataattggttgtatagtgtagtggttatcactctcggttttgatccgggcaaccccagttcgaatccgggtacgacctttactttttttgaagttctttgttttattttttctacctattgttagcacaaacctctgttgtttaattaaaccatttaaacactttaacatttactcgtatagtaacaagagattaatcacagttgaagaaatcagttgtagaatttgaaaaaaatacaaaatttacgtgtctttaaactgtttgaagattaaagtgaaattacgcgatttgaataattaacatgagttaaaaattattgatttattgattgttttcactacataaatgaattactttggtatgttatatagatgatattgaattggagttaaataatagaatatctacgaaacaatggagaatagtaacaataataagaaaagaaaagaaattgaagaagaaaatgaggaagaaggtacagataaacaaccaaggttatcatttttctataattcaagtgcaattaaaccaaatatacaaagagagagggcattagatgagattgatagagttgaacaattaattacattaaatttacaaaagataaatgaaaatttaatgatttctaataatgttataagtagtaaattaataccaacattagaaaaatttaattcaagttcaattaaattatttaataatattaatcatataaaagaatttttcgaaaatgcagcaaatgttaatatattaacaaaaaaagatgttaagttttctgataatgaaaatgagaatgatggtaatgatagtaattatttacagttaagatcaagttcatttactgaattaaaacatgatagattaactagttcagataataatttatcacgaagtagttcattagtaagggttaatgatgataatagcaataataacaatgtaaataaagaaattattgaaccgactatatcgaatatgaataatacgagatctttatttgatggatttaaagttaatatcgatgaagaatccactggtaaaaatccagtacaacgtaatgttaatgaaagtattgatgatgaagagtttttcactataaatacattcaaatctgatgatgagcgtagagaatcaaatgagaaagagaaagagaaagaaaatgaaaaggaattagacgtagaagaagaagaaggaggtattgagagtgaagataaatctaataaattcgttaaagatttaatgagtggatatgaatctccaccatgggaggaaccacccgttttacaatctgttagatattctaaacatttacatcataaacgaagaagtgaagaaacaggaatacgatcggatgaaagagaagaaattaataataataataatgatgatgataaagccagtgaagacaatgaagataatgaagaaagtgatgaagatgttagtataaggttcccatcatcacctaaatatggaggaggtggtaaattattaagatctaatgaaggtagacaaattgcattagattttgcaagaagtgaaatgatgaaagaacatccaatacgttcattacaaagggatagtactaaatctaagatagcaccaattagaagaatgcctactaccagtgatccatttcgaagtgatatagatgattccagcagttcatttgaggatgtaccggtgttagagagtgaaaagttacctaaacgatatcgatgattacgtaatgtattattttttaattggggcacattaagtcattaaatttgtaaaaaagtgagaggacccctttatttttcatttgcctttgtatttaactttctttcttttcttttaattcttttagtatacagccaatgatatttcaaataaacaacagacacaacaaaagaactaactttaaaaacaactacactgttaattcagttttatatcttcttttcaataattttaaaattttgttcatttcattattaataatactgacaacaggttacattatatcagctcatataccatataacaaacacccgtcattatcttatccactgtcccaatacaatgttgaagaattctcaatgagtacacattacagtaatcattataataccaataataataattataataataataacaataaccctgattcttttcccaaaaatcatcaaactacaacaactacaaattttatgaaacctacagatactaataccgataactcacatgagagtatatcctctttcaatcataacaatgtactaatatatggaccatttgaatctcaaccaagtacacattttgaactatacaattttaactcattaatgttagttgcaatactattcatatcttgtttcctattattatcctaatcatcctaaccaaaacaatcaacatgaatcaactccgaataatcaacaacgttgccaatgattcatcaataatctatcagagacccctgataattacccgtttaggaaatccgcaccgcttcacaatagatttaaaatatttttttttgattcgctatctcttacccttcactctttagtagtgagacacttttgcaatattgcaaaacacatcagttacaggtaatattacagcacacaagtactttattggttaaaagaggaccaacaaaagtgaacacaaaattgtcgacgaatttcaattagagaaaaaagacaacacatattattttcattatatttccagtattatttattccttatctataatttatcaagatggattataaacaagttgctatcaataaggcaaaatctttaatcaatagtattccaagtgaatggttattagataatattccttcaccagaggaacaacctaatgtaaatgaatatcttgattcaattttacctgaaaatgaaaaattaattacttcaagcaatgcaaatgatttattacatttacaagaaattggtaaattaactgcttatgaaattacttatgcattttgtcatagagctgcattagttcatcaattaactaattgttgttctgaaatttttttcgataaagcttttaataaagcaaaagaattagatgattatagaattaaaaacaataataaattaattggtaaattacatggaattccaatttctttaaaagatcaaattaatttacctcaaattactacatcaattggttatattgcacctcatatttctaaagaatttgaaaaaattattacaaatagggatgaaaatcaaaatgatatttcattaattgctgaaattttacaaaataatggtgcaattttttatgttaaaacaactgtaccaatggcaatgttaggtggtgaaacttcaagtaatttaggtacaacattaaattctattgatagaaataatgcatgtggtggatcatcaggtggtgaaggtgcattaattgctggtaaaggttcaattattggtattggtacagatattggaggttcaattagaattccaagtgcagttcaaggattatttggtttaagaggtagttcaaacagattcccatatttaaatattgcaaattcttatccaaatcaaattggtgtttgttcagttgttggtccaatgtgttcaaatattaatgatttaattcatgttagtaaagttattttaaatgatccattatgtgttcaagatccaagatgtattccaattaaatggagagacgacgatgaacaagttaatgataaagtaactaatattggatttttaagatgggatggagaaattttacctcatccaccaattcttaataatattgataaagtttacaatattttaaatggtaatgatgattttaattgtcaaataattgatgaaaataaattaccagttaaattatcacaattaggtaaattactgttaagtttttataattgtgataattttacagaaatttccaattattgtaaattaagtggtgaaccattaagtgaattatttaagagaagttttaaatttaaggaagataatagaatggataatgttgaagaatttttcaataaagttaaattaaaatatgaatatcaattaaaatttgataaattatttaatgaattaaatattgattgttttattatgccaagttattcaacagtttgttggaaccaaggtgataataataaaatttctaatttttatacaagatcaattaatgtattagattatacagcaatgacattcccagttggtaaagttaatgaaaatgatgtttcatttcatagagatgatgatgaatttattaatgaaatggatgaaaataattggaaatattttaatttagctaaacaattaggtaaaccagttacattacaattaatttgtaaaagatataaagaggaggaatgttgtagaattgttaagaagattattgaattgttataatatataagtagtttaattgtttaaatttttaaatttttatacacacaaaaatacattagataagtagacataatataatataatataatataattgataattaaaaatttaattagattttttttcatcagaagttatataaactctatcatcaattttaccttcaacatcagatctaatttcatccattaattttgattgtttttcccaagtttttttatcaattcttttatctttatcaaataattctgcatcaggttctctataagaaccacctaatctatcccataaagttgtaaattgaccataattatagttaaaataaagatgatgaattgtatgacaagcagcaccattaataacaggatcatttgataaatattcaccatcatgaatcataacagtccaaaaattaacaaatgtaaataataaaaggtaagaaattttatgtaatgggaaaaaaaatgggaaccaatgataaggtaatgattggaaataaccatcaactggatggaaagcatgagaagcaaatggtgtacaaacaatccatttatgatgaggtttatgtaattttttataaattggaggataatgtaaacctctatgaataaaataaataccacaatcagtaaataaaataaatgaaggtaattgccaaaaaattgctgaccaaccaccagttgaattatcaatattccaatataattttgaataaccatgaagttcaagtaaaaaccaaggaactgttaaaagaaccataattggtatagcagttgaagcttgtttaatttccatataaatttgatttttcaaatatcttggatgattaaaattagatttatcataaacaaatgtgaatgaaatccaagcaactataaaataaagtaaccaaccaaataatgaagttacaaggaaaagtgaaattgtttgtcttataaaactatatcttggtaataatgataatttggaataaattgtttcatttgggaaaaaatgataaattgcattataaccgtaaatttcattttcattcttatttggtaaaaatgaagttaatttattgaaaattggattattatttaaattttcccaatttttatcaatattggaaatagctgatttaactaattcaggagtttcaggtatataagattcataagattttggtaaaattgttgcataaactttatcaaagagataagtatctaaaacttctaatattaaatccattattgactgatttatagattgaagattttgaaattagatagtaaaataataagaaggagtaaaaataataattatcaataagtaagaaatagagataagttaaagtatttatagaactcagttaagtagtttaaataataaataaaataacctgataattaataaatgaaatgaaaagaatgaaatgatatataataaattgaagaatcaacacttaaatgaaatgataattattagtattattattaataaacagattcatttttcatgttctttttattatacgataaatttattatacgatatatacgatatatacgatcgtataaatttaatattttcattacgtaattgtctcacacacccgacgcgtcgttagttatgcattttccaagtaccgcaaagatctatgttgatgaagcgatcatgttgagagcatcctctttgaacgaattgaaagatatatcgttcatcgttatttaggtaattcttgttgttggagtattttaatggaaattgattcaccattagcaactactgataatactactaaggatgttgattttaccgctattgttaataaatttccattaaaatactccaacaacaagaattaaaacaataaagattacaataacaagaatgattataataagaacaattctaatagaagaatccattattggtgcaaagcatgcagttgtgctaattgtgctgctgcgaaatacaaagatttcaagaacaataagtttagatttaacaaccacagaaaaacttacaataaacgtctgcaactgtacaaggacaagtaacttcttctctaaattcatcatcatcgaatgtttcggtaatgacattgaccgatttattgtaagtttttttgtggttgttaaacttggactttttgttcttgtaattgttatatttagacttcttgttcatgtaattgttatatttagcagtagtatgtttacaattagcacaactgcattattaatcattctgttgttaataacttgaaaagtttatgaaccaataataaatttgtaattataaaaaataatgcaagggagattgaatacaattaaaaatagagatagtgaaatttcccaagtaacgataaagatgatgctttcaacattacaacttcatcagtatttaattgagcttttttaacatctgactttaatgcaaatttagtgatacattcatcaaaaaaaaaaaaaaatcttttcattgttgtttcatgagtaaatttataattatcttgaaaatgaatataacttcattgaatactttctgttcatatccttgttaccaataattaattgtttgaattattcttttattataaatttccaatgacttatagaaggttgttaaattcttccttggtgacaactcttttcatttaattgagatccgaataatttaacttcatcatcatgttttaattcgttatcaatgttctctctcttcaaacaagtcttttaaatcttgttgtgactgaccaaataatcttcaattcccgacgtatcgacccttctattagataaggaaagaaagaaaaatttttttttttcttcattcatttatttatttaaaaaaataaattcttcactattataatgcattaagaattatcagatctctttactttactttactttactttactcctctctttaaggcgagcaattaagcaaggaaccctcatcaatactattataaaaatgtccgctgttaatccaaaagctttcccattagcagattctgctttatcacaacaaattttagatttagttcaacaagctcaaaatttaagacaattaaagaaaggtgcaaatgaaacaactaaaactttaaatagaggtatctctgaatttattattatggctgctgatactgaaccaattgaaattttattacatttaccattactttgtgaagataaaaatgttccttacgttttcgttccatctaaagctgcacttggtagagcttgtggtgtttcaagacctgtcattgctgcttcaattacaactaatgatgcttcaactattaaaaaccaaatttatggtgttaaggataaaattgaaactttattaaattaatttaatctaagtatgtactctttatagaaagtaataaaaataataataataaacaatcttacgtaatatgtcccggagattctagtctttaataaagcagagagaggggagcggagaaatgaggaagaggaaattgtgaatttttttgacatgaattgcattgtattatgattcatttgcaggtgttttcattatagaggggattaccgtgttcggagttgttgaatccgttgaagttttcttatcttagatctcagttattataaatactaccctattgtcctacttttatctgtaaatcagttattattgattatactttttatattaacaaacaatgtttagacaatcatctagagtaatttctaaatcttttaaaaattcaaattcaaatttattcatctgtagattaaattctacaaaagtttcaccagaaccaacagttgaatcatcaacacctaaatcaacttatagagttaatgataattccacataccctgaggattcagctgatgcaacttcaacaattcttgctgatgcaatcgatttccaaaaaagaattcaattaaaggatagagttacatggtgggaaattttacaaaagaaaaatttaagaaagaaacaaggtaaaaatattgattcattaacaattgatgatgttaaaacaaataaaattttggaaaagacaagagctgattctttctcatacattactttaccatttaaagatgatttatcattaagagatttttatattaatgcacctggtagattaagatttggtcatttatttcaagatttagattctttagctggtagagttgctgctaaacattgtaaacctgctgaaccaatgaatgttaccgcttcaatcgatagaatttatgttacaaagaaaattgatgaaattcataaatataatttcttaattgtcggttatgttacttacactggtaattcatcaatggaaatttgtattaaaggtttctcatatgaaactaatttaccaaatgcatctgatattaatccttcaattgttgaaaatcaatcgaaaaattgcttcctttctgctaattttactttcgttgctagaaatcctgcaactcataaagctcataaaattaataaatttttaccaacttctgaatttgaatgggttgaatttaagagagctgaatctcataatgctgcaaaaaaattaagagcaaaattaaattctcttgataaagtaccaccaactgcaaatgaatcaaaaatgattcattcactttataattcatcaaagaaattattagaaattccgaaaaatgatagaccaaaaaatatttattttatgaaagatacaagaataactgctaatcaagttcaacaacctcaatatagaaatagacatggtattatatttggtggttatttattaagacaaacttttgaattagcttattgtgcagctgctgcattctctaaaagttatccaagatttatatcattagataatacaacttttaaagctcctgtacctgttggttcagttttatcaatggatgcagaagtttgttataccgaacatattcatgaaattaatgaagattctaattctgctaaattagtttcaactttattaaatgattttgatacatctgcaaataaattaagttcagattctcgtgaatttttatcagtacctggtacattaattcaagttcaagttaatacgaaagttcgttcacttaaagatgcatcaaattttactgaaagtggtacctttgtttatagtttttatgttccaagagatattgattcagttgattcaccaggttattcatcagtcattccagaatcttatcgtgaaatgatggattatgttgaaggtagaagaagagctttcgatactgctgcttatgcagaacaattaaaattatatggtgaattagattaatttaagtatagtaataattgaaaacgtatataaaaatttaaataaattaataagaaataaagtaaagtaaactagagtacaaagcaaaaattaaaaattaacaaaaaaaaactggaaactgaaataaatctaaaatacatgtgcaaatcctataaggcatcttcataatcatcattacttaaatcaaataattctgctttataagatttttcttccctttgaattttccttgataatgaaccactattctcaaatccaactaattgagcttcagatgacatcgaattatatgatgtatctctagagattttattttcatcttctcttagagtttctaaattattattgaattctttactactattataattataatcattaaataatgaatcatcacttggatttgaatttcttaattttgataatttggggaaaatcatttgacttttccgtattttatcatcattaacaacattaacagttaataaatcatttgttgaaactgtaatcaatgaatttaatgaatctctagtcttcaaattaccatttgatgatcttctccatgaattgaaaattcccgttggtttgatattattattgtttttattattattattagtatttattaattgatcagtacttgtatattgatctgcaacattatataatttatcagttgttgccttttcacttaatgttgaatcatttgctgaataatatgaatcactatcactacctttctctaaatcaactaaatttttttcagctaaaatacgtgcagatgatgatgatgaatttgatgaattttgtttacctattggtgcaggtataattggtggtaatgatgatggatcttcatcattttcattatttttcttgtttctacgttttgcacaacaacaaaagtaaaatattaaagcagctgctattatgaaaactattggaattgcaacacctaatccaattgccaaactttttttacttgtatttgatgatttatcaacaataattggaacagcggatgaactagttgatgcggaagatgtggttgatgttgttatagtatttgaagatgaaacggatgatgatgaggatgctgaggattttaatgatgaatgtgaatttgaacttatataagaagacattgatgatgatctcgatgatgatctcgatgatgatcttgatgaagaactatgaattgttgaagaagatctataacttgatgaactacttggattaccaacaatataaaaacttaatgattgtttcatactattcattgaagcatttagtttaatttgtgatgaattaaaatcttttggtacattaccaataaatgtattatttgaataataaaaagttaaccaatcatcattataaattgcatcaattttagtttcatttttattttggaaaattgaatcaggtaaagtatattggaaaaatttcccattttgaacagttatattagaaattgaatcaacattgaaaattttatgtaaaacattaatttcataattcatgaaaactgaatctccataaatatcagataatgtaatattaacaactgtattattattttgatcattggggatagtacctgataattttgaattattttcaatactaatccaagatggtccattaataatattaattgtattaatttgattagtttcaataactttatcatctaaataaatatcatttaatggtaaatcaatttcaaatttatcattaggatttttcataattgtattattataactagttgtattttgaatataaagactatgaccaccaacaattaatctaaaatctgtataagcagctgaaaatcctgaataatcagttgcaattaaagttaaatcaaattgtaaacttggagcattaattgaattaactggtggtgaagtaccataaaaagttaatgaattttcatcaaagaaacaccaacttggtaaagaagttctatttgcacttttaccataatattgaataattttatttgatgaacttgaaggtacaataaatgaattatcattaaatgaaaatttaaaagattgttcaggttgaataactaatccattattaccatttgtattacccattttaattaattgagtaattattgaattatcagggttattttcaatagatggttgatttgataaataaattgaacaagattgattaagtgaatcttcattatcagtaccttgtaatataaaatcatatttaccttcatttgaatttatattattaccataaaaagttaaagaattttcatcaaatgataaccaatttggtaattcaaaggcttgatatttaattggagaattattatcagatttaaaagtttgtgaattaattgtaaataaataattttcacctaatcttgcaatatcaggtaattgattattaaatgggaaaccattataaacataagattgaacttgatgaattaggaatgtcactaccagtagtaatgtcctggctagagacatgtatgtcatgatcatttatatatatgacttttatctagtttttaaatttatgtaagggttagtctttgattaaaaagtagattaagaaaaaaaaaaaggatgtaaagaaaatgtaccaagaaaaggagaaggataggagacaaaattagaatatatgagatactagtattattaagttggaatacatcatagagataataataatttcaattaatttgatgaatacggacatttaattaaaattataacatttataaatagagacgcgttaataataataataataataacaaacgcgatatttaaagacattgaaaaatttttaaggggttgagaataataatcgcgtttatattacgtgtgagtattatactaatagtttattacgtaataccgtcacgtgataattacgtaatattattatctatgacatggtttgatgttgtgttttatttttattttcaggtggtcgatgcgtcggtgtattatttttctaagtttttttaataatcattggtatattaggagaataatagtattaagttagtattctagtgatagatggttaataatatacaaacaggtaattaataatgggtaatataacatcaacatcatttgcacctgaatgtaatgaattaaaacaaaaatatgatacatgttttaatacttggtattcagaaaaatttttaaaaggtaaaggtttacaaaatgaatgtgaagatttttggattgaatataaagaatgtcttgatattcatttagctaaacaaggtattaaaccaatgttagaagaggcaaagaaagaattaccattcgatgaaaataataatataactgattctcaaatacagtctgagataaataaaaaatccagttagttttcattttattttattttattttatagaaaatttatatattccatatcatgcatgtacatatactaaagataatcatcaaaatcatctttgaaatctgttaattcattattcttacccttaataccacttctaacttcctcctcttcaccttcttcttcactactttcttcatcactatcatcatctcctggttgtgcaagacctggggtaagtcctttaactgatatataacctttagatattttatcattgaattcattaattctagcatttcttctcttatttgctaaaacttcttcacttcttaattcctttaatttattctttgtattttcaacttttgttaattttaaaatatcattctgtaattctaataaatcttcatctttattaactaaatcttttttctcaatttgtttaactttactattaataatatcatttattaaatcttcatctttattaattaatttactttgtcgtataattttttcattaatttcttcaactttctttaattgtttacttctaattaatctctcttttcgtttaaatttctttaaatctgttaaattttctctaaatttacctaattgtgaattcatctctaataatttacttgctttatgatttatactatcatttttcttacctttatcaagttttttcttacttttgagaattttcttatcagttgtttgtaaatatgttgaaagtaaattatcaacagtgtttaatgattgttgtttggtcttcttgttcttgaacattgtttatgtctattaaagtcctactacaagatatataactaaaaagtaacatacaaatcaagaataaaatttttataataagtaaagtgaaaaaaaataatttttttcatgttggtgcatgcgccacgtctttctcaatggctgtggcggtgttcatgatggtgttcatgatggtgttcatgatggtgttcatgttcatcactgtgactgtgatcgtgtccaatactaccacccatatgatcactacaggcacagaatgaggtaggattctctaattcttcatcttcactttcttcgttttctataaaaccttcatttacagcatctaaatccacttttttaactaatttaataaattcaacaacttttttattatacccttcctttatactccaaagatctttaataccagataacaacttattattattaattatatcatcacatattttttcttgatttatttgtgaatttgtaatcattaaactataccttaaaatttcaagattttgaataaatttagtaatattatctttattattcaactttatttcattattaacaaaatcattgatactttcatcactagtccttacttttaatttctcacatatacgtttgactaaaataatagaattattatcatctttattaataaattctttaaattctttagatacagtggattcaataaaccatttcataacttgatcatccgttttattgataatgatatcatcctcattgatcaatccagcatttaatttgaatgattgtgaaagatattcgggaatgtctaattccggaatcgtcgtcttgaatgcatagatccatttataaaaatcttcaagttccgttaacattgaaactctaaatgttcttctcttaatctcattctcttcaatgattactttaggagtattgtctatctttaattcattaactttctctattatcccgttattatcattcattattgtctataataataatatcaaagaaagaaaacccgtataaatagacaaccattgtagtaccatttataaatttcaattttgatctcattctttctttaaaatcctatattacatacttttcaaaaatttttttttcatacaaatcttagtcataaagtcgttaaataaaaaagaaagaataatagaaataataataaataaataataaggtataacttagagttttgcaggtatactctcctttgataatgcatctcttaattcatttaatgataatgttaaataatatgccatttcattaacattataaccaaatgcattatctttataatttgtaatattaatatgtaaccaatttttattaatcatataagctaatccaaaaccttcaggtacaacaggtgaccatccataaccattaaagttttctgaacttaattgtgatgttgataaataccaatattgtgaatatgaaaacattgaattattgaaaaattcatcaattataagtgaaggtttagaaatatcaatcatttgctttaatccaaataaatgtctatcaactcctaaacctgaacttgcatttttaatatattgaccatgagatttaattgcatttctaaatgattttaatttttcatctattggaattgatgaattttcccaatctttaacaaattttaatgcttcatttgaaacacttctacatgtctctgttctacctttaaaatattttctagttgatgcagattcatatgttggtcttaatgtaccagtatatttataataagctaattgaattaaaatttgaataaaactatcaggtgatgttttaaataatttaatatcttccttaccaaatccaaaatattgccatgttttaatatcaagtgaattagttgtttccttaaattttacaagttcagtttgaatattatcctttaatgtattactaatttcaaaatctaattgtgtaaataatttttctttatttgattctccactattgattaaatcttcagtaaatttaaatttagaaacttgttcaactaaccaatcatttaatctaagagttggagtaccatccattttagaatgttcacctaaaaatccagaattaccattttgtgaaacgaaaatttgaattggtttatcaaaccatctattaaatccgttaccaaaccaacaatttttagatttttcttcaattgtaattggtgaattattatcaagacataaaacaaatgaacttttgaaaatatcatttaaatgagttttattctttgatgaaatttttaaaagtttaatataatttttataccaatcatctctatttgaagatgttaaaatcccaataggatttttatttggtccattattaattgaaattgatttaatttttaataatgattgataaatttgttgaaatgttaatggttcatctgtaatttcatcatgagttcttaatttataaatataaccatttgaaataacaatcataaatctattttctttaccattgaaaattaaattattatctgattttaaacctggaattctacaattattaaacatccatttaaaactttccatacaaaatggattatttttgattaattcaggttctaatgattcatcttcaattgatttcataaattttaatatatttaaagttaaaacagttgattttaaaatttgatcattttcaattttagaatttggtataactctatgagagaaaaaatatgaaacaaatggcgaaactggatctctataatctaaataagcataattatcccaaaattcagataaccaatttcttttatcattggaaaattcaattaatttagattgtaattctttaccttcgatactattaccaaaatcatcaataatttgtgaatatttaataaattcttcatcattttcaccatttgcatataaaggtttaattgattctttatataaatttaaagtatcatttaatggaggaactggtaatgaaggtaacgaatcttgatatttaaataattgtccttttgatgaagatgaagatgatgatgtagcagtagtacttgttgtatatggagacattatatttgcaaatgatcttgtagtattattcagttttaaataattacttgatagactgaaaacaaactttgaatttaaatttttcgatcttgaaagtgaagcagatatagtcataaaaaatgatttattgttgttttactgtttattcagttggtttaaatttgaaatttaaatttgtgtgttataagataaagtttattataatttaccatctcatccattatattttattcaggcaacttatcttccctttatatacccttccagagatgaagatttctgccccgccaaaagctaagaatttcaccccgtcaccaactccgattccgaatctccgaggagctgaaaaattgcgggggtgtcattacctaagcatcacgtgacccctatatttataagaattcatagataaagagacaatcactagccttaccttgccaaccacgattaccacttgcagatacgaggaatctacatgttggatcaacgtataatgaactaacaataccaccttgatgacctgcaacaattgaaaatggtacaatactacgatttttttgatttgtattattagcctttgattctaaatcatataaacgaatattatcctgtgaaccacataaaatatatctcttatttggcattgttgtaatacatgatacactacctgataatgttgggaatttaaatgtatctaataattcagtagttttccttatatcaaattgttcaactgttgaattacgtctaccaatgaaaattgtatcaccatcaactgaccatgttgatgacatacaccacggtggtgtaccatttggaacttgaatttgcataactctattatccctctctgtaattctagaatcccaaattgatacaattccatcaattgatgcacttaggaaaatatcatcacttttttgaactccttcatatttacccgtttgaattgcatctctttgaagtttttcaatatctctcttcatttcaatattatcatcaattggttttttcgattttttgtcttcatcatgatttttgatatcttcctcctcctcctcctcctcctcatcatcatcatcattaaacagtgaatcaacatcactatcattatcatttgaattaattttccaatcaattgaactaccaataattggtctatattctaatgaagaaatttgacctgttgaattaataaaataatttaaatttttaccagtatttaaatcccattttaaaatttttttatcccaagaacctgaaaggaaatttgtttgatttgtatttgttataatttttgaaactggcattgaatgatgtaaatttttatttttaacactttgatcatttgaattatggaaataccattgaattgaaccttcatttgatttaattgattgtaatgtaattgaaccattatctaaaccacttaaaatccaattaccataattttcactacataatgaataaactggactaattttaggttcaaataaaacatcagttgatgaacttatagttgatttataaattggtaattcattttcccaataagaacataaaactccattaaattgaattgaatcaactaattgatgtttttgtgaaactgttaataatgatttacctgaaactgattggaaaaaatcaaattttctaataaatccatcatcaccacctgtaaacatccattttggacctttagtaaatgtcattgaataaacttgtgatgaatatggaattgcaacaattggattaacatcattaatatctttattaattgatgcatataaaagttcatctctaagagagggtttatttgatgtttctaaatctttttgattatttaaaatatcaatatttccaccttcattaggtgtatctatatccatttcctgtgtcatttgatgattgatttgttacagaatgtaaagagagtgttttgtatgaaaaattcaaacatactggaaaatactgatgaaaatggaaaaaaacaaaaaatccgcgaatttggtgataattgtggtacaaatttttcaaaatgatgaattaattaactactgacactttaatgtttcttttatgaagggagaacaactacacatatatgacagaggaaaccgttatatttacagaagatttaaaatatcaatatccagaaactacacaattaggattaaataatattaatttaaatattcctaaaggtagtaaatggttattagttggaccaaatggagcaggtaaatctacattattaaaagttttagcaggtaaaaaattaattaaaagtggtaaattaagattatttaatattgatccatttgatttaagagttaaaggattagaacagaaaactatagtttatcttggaacagaatgggcaaataatgaaataattaaaagagatattggagttgaagaattaattaatagtgttggaggtaattattatattgatagaagaaataaattaattgaattattagaaatagataaaaaatggagaatgtgtcgttgttcagatggacaacgtcgtagagttcaattatgtatgggattattaaaaccatttgatttattacttttggatgaagttacaattgatttagatgttttaattagggataaattattaaaatttttatcaaatgaaacaatagagagaggtgcagttgtaatttatgcaacacatattttcgatggattaggagattggtcagataaaatattacatatagttaatggtagtgttgttaaaacatataatagagaagaaattaaatatgaaggtgaaccgggtgttgtacaaagaggtgataatgagaataatgaagttaaaataggaccaattcatagtcttcatccattagcattacaatggttacaaactgatcatgatgagattatgtaagcagcagtgattacataatagagtacgtaatataaaattcgcggatttagcggggtaaaaaacccataacgtaatgtagggggtgccattttttaacaattaaagttgccctttttattgttactatgactaagtgagtggcaaaacaatcaacaggctcagtatattatttattttattcattttattcatgttggctgttttacacccccgttttatactttcttttcaatctttaacttctttccactttcttttacaaatgtatctgtatctggctccttattcatcaaggagtaagtgtatataatataaactaattaataactcttttctattctattctatttcatatcatcttatccatactatttaatatacacccccgcacaatcattaattaatttaaatggaaacagttaaaaaaggtagatcaacttcttgttatttatgtcaaaaaagaaaacaaaaatgtgatcaaagatccccttgttgtacaaattgtcttaaatcaaaatctcaatgtattcaacctccaagatatggtgaaaatttaattcatccaaaagatccaaatagtgattatacctctttccttgaaaaaaaaattcgtcaattagagaaattacttgatttaaaaattcaagatactaaagataagaaaaaagataatagcaagtcaaataataataataataataataatgataataatagtaatagtaatgtttcaactccttctgcctcagatataataaagacggaaaaaatattaaaatatcagaaaatttcatctctaataagtcaaccttcaactccaaatactaatactagtaataatagtataccatcaataaattcaaattcagatccaagtactccttcacaaattcatcaaataccaataattgatcaaccttatgacaattttatgaatcattattcaaatttatataaaacttccctattaagtaaatataacttaactgaaattatcaaacttgattcacctcaaaaattagatataaaatttacaagaaatttaacttcattatattttaaaatgttacaatataaattccctttactaaaagaagatgaaattttaaaatttcatgatttttactattcaaatacaaataataatacaaataatgaggatgatgattttgacttcaatacttcaagattacattttatttatgcaatatctgctttactatacaaatcaactggtaaatataaaggtccaaatccttttaattttttttcaaaagctttacgtcatttcattttagcttcaaataaccttaaagaacttcaaaaaattgatttattaatattaatgtgtattttcctaataagagctgataaaaatacaaataatattttcttaattataactgacgcaattcacatatgtgttggtttaaaattacataaggctaaaacttatcaaaatattgataattctttaaaagatacatttatgagaaaattttggtgttgttatattctggaacgttcaattttaatttcaattactaaaaaatttattttacctgaatcaaaaattgattcaaatatacctttatttgattatgaaccttcaaaagcttttagtccaaatggtaaaacttattttattaatcaatcaattaaaatcaaacgtttagaatcaagatttaccgaacaattatcaatcttttctagtaataataataatagtaataataataataataataacaacaacaacaacaataataataatatcgttaacaacgttaacactaccaaaacaggtaattcaaacagtaaaaattcatcaaaaccaaaatcttctaataaaaatttaacatcaaattcgaacacgaaatcaaaatcaaatataccacaaccaattcaattaccacaatcaaataataattctcaatcaactttaaaatctcatttaccaaaagttgaagttttctttcaagatttacagaattggagaactgaatgtcaaggttttaataataatggaattgaaaatcaaactttgttgttttattattataaagcaattagacaattaattcaaccttatttagaattattagatcctgatgataaattatttaaagaatgtcaagcagctgcaggtcaaatttgtcaatcaattaaacattatcattcaaaaacttattatggtttttcaaatttaaatattcatcttgtttttattgcaggtataactttagtttattgtctttggttacaaagaaatagagatgatatgagaagaaaattattaggtgatgataaaaaacatacaagaccaacagtttctgaagatttatttagaggtttagatgatttaagagcttgttcaatttccctttatgttatgagtgaacgtacaaaatttgcattaagttttagagatatttttgaagaaattatgaatgcaacagttggtaatttaattttaagatgtggtccagattcatctgaaattttatatagaggtattggtttaccacctgcaattttccgtaaacctttaaaacattttcatattgaatcaaattatattgaaaaatcagatgatgataaattagaggatgaagaaagattgaaaaggaaaggtcatttaactagaagtgcaattccaaaaggtttaagtcatttactgttacatccaccaggtttagaaaatgataataatacaaatactattactactaataataataaagaatcgaaagttaatgatgaaaaggtaaaagagaatgaagaagaaaaagaaattaaagaaaaatccgaagatgataatattaataaagataatgttaaatcaattgaaagtgttgatatcaataatagaattttaccaccaccgattaaattaccacttttaccacaacaaaatagaatgacatcatctttaaatagtaaaaatattgataatgatttaaaatcaattacaaataatcattataatttaagtagtatttcattgaagaggaaatattctaaaactgaatctgatagtgattcaatgatttcatcattttctaaacgttcatcacctggaattcataatttatcttcaataccttccaaaaatttattatcaactaataatataaataatttaccaactatcaatactgaattatctccatcaaatgttagtagttggagatcaccaaattctgtttcaaatatttcatcaaatttgaatcaaaataatacaaagacgcctaatactaaaacaacaactacaccgtcaacttcatcaaatacaccggattcaaatgtttcattaccatctaatatatcagattttaaaacacaagtacctgagatgcttgattttttcccatttgttggaggtactaatgcaatgattagtaatatttctacatggactgaacaaagtggtcaacaaattccacaaactggtcttacaaaaatcaataataatgatgataatactaacaatactattaataataatttcaataataataacactcctactaataataataacaataattttaattacaattacaatgattataacatcaataattttgtaccaattatgaaaacaaacaatggtattaatactttaaacaccaccactaacaatttatttcaacaggcaaacactagtaataatataaattatggtattggtatgaatatgagtaatatgaatatgggtgttaccggtatgagtattaatggtttaaatatgggtaatcaattattaaattcaaataataatattaataataacaccaataataataataatactaataatactaatagtatgaatagtataaattctaataatttaaataccaatacgatgaattattctaattattatggatccttaagttctaattcaagtttaagttcaactaaaaaaaatccaccaatcaataatcaaatcaatggttcaccatcaacatttaatcaacaaaagcaaagaacacagcaagaacaaccctctcaacgacaacaatcagtatcatcacaaaattatagtagtatatcaacacaacaacaacaacaacaacaacaaaatcagaatccaggacttatgtctgagacatttgatagtattttcgatgttgtcggtagtgaagatttttggagtttaaacaatgatttaggatttataccctgaacaaatgaaacacttcatttttttataaacaattaaataaattactttataaaataggagttaaatattaaattccccacatttttcaacaactttccattcaacattattaatcatacaagtatcataaatatttaaatttttaccaattttcaataattgttcataatgtggtaaataatcaataaatttaccaaattctattaaattttcatctttaaaacaacgtaaaacaccaacattatcaacaatttcattagaaattaaatctttcctccaaaaaataccttgaatccaagaatttaataaaataattctacctatatcaatatttgaaactgtatctaaaacaatacaattattatcaattaatttattaccaatgaatttacattgaggacctaatgttgaatcaacagtaatccatttctctttatatttttccaattgattagtcaatggattaatcattttaccagtttctaatctaatacctgcattacgttcattttcatcaattggatcactgaaatgtccaatatctgattcaattttaaaattttcagtgttaccattatgcgttaaataatgagtaattaattttgaatcaaggaattcatgattaaattcaataattgttgatgaatgttcaatttcataacctgcaaagaaccaatcgaattgatttgaaaaattttgtatatttttcagtttcctaatatcaacatatttacccaatggggaagttattacgattgttgaagttgattcagattcttgtggttcagtttctaaccattgaattgaatgtcttattgataaactcattgcatgcaagataaaacatgaacggatcacttgaatttaggaattattttttgaggtatttattttttttccattaattaccgaatcattagtattttcgaaaatttagacatgtttataactatagtttataaaaaaaataataaaaggtacatttacaatatatactatacaattgtatgattatgaccaggatcattaattgtattaccatcttcatcaattgtacaatatttaatatctaagaaccattcatcatttaaaatttctttcattgtagctctatttttaatatcaattgttaacattttactaattattggtcttgatgcatgtggtaaaagtctcattaatctataaggaccatgtatttgcttttgacttttagttgcagtaactgtacgacgttcaggtaattcagattgtccatcagttggacaggtattggtattcgcattattattaacagattgttgttgttgttgttgttgttgttgtgtaggtggaggtgtggaatcatgatgatgatgatgatgatggtgaacatgttcatctttcggcgttgtgatagttaatggtttatcatcattttgttcagattctgtaactggtttaggtaattcctgttgaataggttgttgttttgatggcgatacttcttgattaagaattttaggtgttattgccatttgatttggatcacctaataatttttcatctaaaaattgatctcgtttgttatctattattggatcatttttattatcatttttattatcattgattgataaatcattaattttttcaactgtttcattaatttgattttccttttcctttaattctttatccctttgttctttttccttttgtaattgaataatttttttctttctttcaattaataattctttatgtttttgagcactttcaacataatcatgaggttgatcatctttcatacaataaagactaaaacttggatcatcatcctttggagctttccaaggaaatcttcttaatgtcatacaacaataaataattgcaattgaccaaatatcaacaaattgtggatcataattatcagttgaagttaaaacttctggagctaaataaggatctgaaccaacaattccatgagctaaaacaatatcatcttcaaatggatatttgaaaacaactgctgaaccaaaatcaattaatttaacaataccatcctttgtaacaacacaattatctaattttaaatctctatgtgataatccaacagaatgtaaataacttacacctaaagtaatttgtttaaaacaacaattaatttcagatctagtcatttgacctgacataacaactgcaaagaaatcaattggtgcatattccataacttcaaagaaatgattattttcatttataatatctaaagtttgaataatatttggatgatgtaaagttgaaccaatacaaaattcagcagtacattttttagcatattctttaactgattcatttggtcttctagcaacaaattctttaacagcgaatgtaacaccatcactttctctaacaattaatctaactgaaccacctgcacctgaacctaaaactttacctaatttaccatattttttagtaactgaaccttctaaatcatcccaaaatttttgatcagttttaacaatcatattattatttgcatcatgagtgaaagttggagttgaaggagttggaggtgtttgatctctttcctttaaatggaaataacctgaagaattagtttgttttagattagaaattgaatttgagattgaacttgataaaagattagaacttgattgatgattattatgtcttttattattattagaagaagaaaaactatctaaatgattaatattattattagtagaagatccattatgatttaatatgggactattattattactagaattcgattgagaatttttacgtgcaggtctaaagaattttttcaattgaaccattgaacttgaaccatttctatgaattggaggtggtgatgaataatttgaattattattattataacttgagttattattgacatcatttttagaactatatgaatctttatgatgatgatgatgatgagtatcatcagacattattgatatttgtgattcatttgaagatgatctacctaaacttaaaccgaaaaatgatctccgggatgaaagatgatgattaccgggggaatttgatgaattattattattattattattaatagatggaatattaatatttgaagaagaatgtccatgtccatggaaatgatcattattgggcacaggagattcaaaactactttgactattctccctgtgttccctatgagctaaacctgcaaatcctagacgtggcatagtgaattattttatttgagtataattttatgaatataatttctaaattggataagttaagttaaaatagttaaaatagatcaaagcagcagttaactagcctacatgcaacagagacagacacagacctgaacagagagcaaccccaaaagaaggacacacctattaaaatacctataaatattcaatcatcagatcctcccactcttcgcctcttaataacccgctcccgcgtactttttctcttttttattacttttactttttactatgacaccgcttttgttgtgtttgattacatgttttttatacagcttacacttctatctagattacttacaatggaacactcttatctgctggatctctaccgtaccagatataccatccttcatacttatgacgcaatggtacatccctagcatctaattcactaatatcaactcccccctgttgtggttgttgaattatcctcttcactttaattgctgatttaacatcataatattgaagtccaaaacataatttacgtgaaactactggtaatacttcaacaagtttcccatatttaccaaaatcttccttgatttcatcaattttaaattcttcactataattaatacccgcatcaggatatccattcctttttcttgtgctattagtgttattattcatgttgttgttatttatattgttgttaactgtgttattattagtgtgattaaatttactggttcgtctcttatcattcaatggcttcttaaatactaataccctacgtgctttctcttctcccttcataagtttagaaatatatttatcactatattcacttatattggcactttcattatcttcatattcatattgatcttcattatattcatcattattatcaacattacttacatcattaccactttcatccatttcaggaatccaaacagtctttaaatgaatatcattaactttgaaaagtcccgtcttggaataaatataaaatttctctgcatcttcaaattcattaaaatgtaaaaaaattgaaacttcatcccaattaatactttgattcatttcatataatttatcatcctcataatattgataattatccttacgtacaagttcaatccttcttaatggtcctccatataattgactaagtaatgttgatatactcatctttttcggtatattagtaatagcaattatcttaaaatgtggtttattaatattaacttcttcaatatttttaaatctgctattgttaccattattactaacattcattataccttcattcttttgtaatgctttattaacggtattagtattattataagaattacgtttcttctccccttcattaccaccacctacacaaacattataattatgactataattataactataatttaatggatcatatccatatgtttgcttagtttcatattcttgttcagaattaaataataatgttttagcaagtttacgtagactatatctatcctcttttacaaaatttgatgcattactaaatgttttgtgttcattattattattattattattaataacattatcactaaaaccattattaatagacttttgccatctatcattattagattgtcttgatccaaccctttcttcattaatatcttgcattttttactataggttttaattacttttatttatgaaggtattttattctttaattaatgagcaatgtctttagtatattgtattttatgtgatagggaagtagtgaagtagtgttatatataaatatcaccaatatactaattgtaatacccttacagagtttaaaagaaaagttctataataaaaaagtaatcattataaataggtatagtaaataataataataataataataatagcagattatccccttttatttttcaatctttttcattcctgttttaagttaacaacacctccaaatcttgatgtatcaccttcaagcaactctcttaatgccatagtggcatatgtagatacccctaattgcatctttaaaataactgcagtctttgatccaccttcaattccatctaatatttgctttacttcttcatcacttttaccttgacttttattaaattcctttaattttaaaatttctaaatcagttttaactaattgatctgtaacttgattatatttacggaaataatattctaaatgattaattttagcaattaaatttctatatgatccacttaatgaaaattctctaactttacgtgtcatattaaatggatctaaattatctttcttcataatttcaacataaacttctcttaatttttcattagttggataaataacatcaaatcccggtgttggtaaaacaacatcataaatattaaatttcttagattcaatctcttccttagtaattggtcttgctcttaatcccggtaattctttaatatcttgaataatttcatcatcatcttcattatcaattatctttttatttaattcttcattatattcattagaattcttttcattattacataaaactaaatcaccttcaacaacttctaatccatataattgaattctctttgatgcaactaaattccaaatatatgattgatatgaatgtccatacataattcttaaatttctaggtatacccataattgcattaaaatatgaattatcactaaattcaccagttttagaatctttctctgatttttcaagtctacttaaaattgaatattctgcattacatttccttggcatctttttaattgctaattttgcatccttagtttctttccaaatttttctagattcaattgatccaggtataacaattttttgttcacttaaaattaattcacctgcatttttccaattaccttgtaaaatttctttaccaatttcatgtgttgaaacagagaatgtaccaaatctttgcataccataataattaataaatccaacatcctttaatgaatttaaaattggtgtaattgcttcttcaacacttaattttggatcaacactttcaacatctttaattgtaataataaattcattaccctttaaatcacctaatttaattgcattatcatcatatttaaaacaacctaatttacaaccttttaatgctttatttaattgtgtaactctttcaactgaaaatctttcaattgacattctttgaactgtaacacctcttctatcctttgtacctgcatatttaatattcttaatttgagttttcaaaaatttagataaaatacttgcaacttccattgtttccttattctccttgtaaagtgaaaaatgtaagaaatttttaatttcacctaaattatgttcaatattgtttgtaactttagtattctttctcttacgacctttatttgcattaaatccaaatataaatgtattattagtagtagtgacagattcaactttaccattgaaaacctctctaattaattgatgaatctttgttctaattgctttatcttcaaattttttactaatttcaacagttttcttattatcttttaataaactaacaatttcagtaacttcatcatcactgaaaaattctttcaatttttccttttcctcttcttcaatatctaatgtaatctctctttcctttaatttacgttcttgttcagctaaaattgctttttcctcttcagttaattcttttggcttgaatccaacatcagttaaatgaacaacatttccatcaacatcaatttcattaactaagaaatcagtgtatctttgttttaatgtacctctaattctaacatcagaattagcatgacatatgaattcagttataccaacatcaacttcagttacaccacctaatgattcattatctgatgtagattgtggttgtgattgttcgattttagcctttttggtagattcttcaactggttcttcaacaagtgatctctttaatgtttcaacctctcctgtactctccatattgactatattccttatcaacaaaagacaccaaacctcttttcaagataataaaatataaatttaaaataaaataaaaaaaattttgaaagtgaaaaatttatcatgaaaatggaaatggaaaaataaacgcgttcactttgaagtttctctacctgcagttgccagttctttaactctgattccatcttaagggtggtatacgtgtttgagctaggttattagttgctaaagttgggcagcgggaaatgattgtcagtggggaatatttgagaaagaaaaatagcataccattggaagatataaagaataagataattaataatacaaatacaaaaattaataatttcatcatggatgataatttagagaagatggttgaaccaattacacaacctacccaacctagtaattataatcctgcaaaggatacactgagtaatgaattagttgaacagggtgtactttgtagattaatcggacgtacatatgagaaatcatttcatattgatgttaaatattcacagggtaagaaaattatagatgataataataatactactaaacaagaatggttatttggtagaaatagtcatacatgtacatatttattacctgtacaaagtacacgaataagtaataaacattttaaattatggatgaatataagtaaaaataatgaagagaatgataataatttaatgattcaagatttatcaactaatggtacatggttaaataattctaaattaatatctaaacaaaattatattttgacacaaggagatgaaattgcaattggtattggaattgagaaagatgttgttagatttgttgttcatttccctaatccaataattaatcaaatgttacaaaggaatgaattaaaatatgagactggtattaataaagattttataattcgtgatgaaattgttggttcaggtgcatttgcaacagttaagaaagcaattgaaagatcatcaggtataacatttgcagcaaaaattatttcaaagaagaaagcattaggtggattagatggtgttgcaagggaattacaaattttgaaaaaattaaatcatccaggaattgttaaattaaaggcattttatgaagatgatgataattattatttagttatggaatttatatcaggtggtgatttaatggattttgttgcattaaatggtgcaattgatgaaagtgcaagtaaagaaattgctaaacaaattttaaaagcaattttttatgttcattcaaaaggtatttcacatagagatttaaaacctgataatataatgattgcacaggatgatccagttattgttaaaataactgattttggattagctaaaagtcaagaaaatgagagtagaatgaaaactttttgtggtacattagcatatttagcacctgaagttataacaaataagaaaaaaatttctaataataataggaaaagatatttaggtaatggtaaaataactgaagatttatattctaataaagttgatatttggtcaattggatgtcttttatttgttataatgacagctcatttaccatttagtggatcaacacaagatgtattatttaaacatataattaatggtgattatcatgaaaaattattagaatcaatgaatatttcaattgaaggtagagattttataagtagattattagaagttgatgttacattaagatttgatgcattacaagcattaaatcatccatggtttaatgatttagatgatgaatcatcatcacaagttagtttatcacaacatttatcacaatctcaaagaccgaaaatgaaatctatatcacaaaaaaataataattttattaataataataataattttaacaaaccaggttttaaaatacctgaaatacccaaggaaaaaattgataataatatttcaacaagtcaaattgatagtcctgatagaaatttttctaatattaatgcatcatcaacaccaattaaaccaatatcatcaacaaatttaacattagataaattatccctagatttaccatttaatccaatacctaaaggtacattaatgtccttaactttaacatcaactaaaacaactaaagaaatgattgataaaatttacataccacagggatcatcatcatttattattggtagattacccaatgttaatattgtcattaatgatgatagaatatctaaaattcattgtattatccttaagagaagacatgtatctgatgatattaatgtatcaacaattgagaattctacattaagtattaatgaatcaaacaatgatggtgatagggataagattgttttggatgatttatggttattagatttcagtactaatacatgttatattaataataagaaaataggtaagggtaaaaaagttaagatttccaataatgatatagtttcatttttcgtggataagaagaataatattagattagattataaagtgaaaattattgataatactggattatttattgataatagtagtaattgccaatgtattggaattgatgagaatgataagaaattatttgatggtaaattaagggaaggattgaaactggctgaagctaaaatggttaagaaacgtaaaaatgatacacctattgaagtatcaaataaaagagtgaaatagatatatattagatagaaacactttgtaaattaagaaatatgtacaattaaaagctagagataatgtttatcatttattgtattaaagttatatataactatagataataaaaataatgatagaaataatgatagaaataaatgtaagaaaaccccaaccccagaaccagttcttttttttgaattttttaaattattttatgttattttacttttttttttaattaattaatatcaatgggggaatgtaaaagaaaaaaaaaagtagtatatgataatcgtacaatcaaactcaacgaatgaaaattaataaatgcatgaaagatttattatagattaaatagcaggagctaaaccaacagcatctttacctaaatcataaattgaataatattttcttaagaaagcatcaccaataattgctaatggaccaattggatcagggaaatccattggagtgaaagcagaaatacaactacctgaaacttctaaagtataatcataaggagtaattgtaaaattataaccatcaaaagtgaatgttaaatcaggtaaattatctcttgaattacaatcaacagtatattgaccattccaagatttttctgcaccaatttgagcatttaaaatttcagctaattgagaaggtaaagcaattaatgaagtaccagtatcaattgctgcaccatgaccttctaattcagcatattcatcacctaaaccaataccatcgaatttaacttcccaataagcttttcttctaattggtaaccaagtaatatcaccattaaatttagatttatcataaccacctaatgaacaaacaccaccatcttcacctgctttagcggaatcacctaaataaaaggcaaattgtggtgcatctaataaacctttactaattgcattataaattggtggaacaactttatcaactgaaattgtatcataagctaaacctaagataccatcgaatttaccgaaagcgaatgctaaacctggttcacttgttgcttcagcaaaatcttgttcaggtataactaaatcaccaaaagttaataaatcttgagagatgaaaccttccaatgaacctgaaccatatctaattgcaaaatcggtaccattttgtttataagttgaagaagaatcatgatcatatttagcatgtaaataacaagctaaagaagtacattcagtacttggaacccataaattagatgaaccagtatcaaggataactttaaaagtttgaccaggagtacctaattgaatttcagtaaaatattgagcattcatataattagttaaaggtaaatcatgagatgatgaagataaggattcaataattgaattttcaacaaatggaacaaatggtgcattataatttttaacaaaattagagatatatttacccttaattgaatcaacataatctaaataggagatatctttaaaatttgattcaaatgaatgtttcttaattttagcattatgaacttttgcctcagcagagccattgaaagaggctaataaaagaaccattgaggtaagaattgagtttgagaagtacattttttaagtttgttacctatacagtgttaattgataatagttatctgtactaggagagtgtgcaaagggaaagttataaagaaagttagaaagaaaagcaggatataaaaagatggcaatatatagataagagctaattaattaattaattaaaattaaaaaaaggatgagccagccttcttttcttgagggcaaattaatttaataattttattttattatggctttattattattattatatttcctatcggtgattatgtaatcgtgtcacgtgatcaaatattatattacgtaattatttatttattatctatacttgccatgtaatcatctataaggaaatccattggtgataatggtgtaaattcacttagtttacgtatatgtttaggtgataatgtagatttaacactggaactcatctcaattggatctgtacttttcgtatagtatggatttatattgatattactatttcttctattattattattattattattattaactatattcattggatcattatcatttttattattatcattataaactaaatctttaacatcaatctttggtgaaattaactttattttaccacttttactaatcctatattgcttttcatttatttgataatcataattaaaatattgtattattaacattgaatcaaatataactgtacccattgcaccaataaaataactaatttcattattccaaaaatttaaactattttcaccacctttaatagaattttcacaaattaataatgaaattgaataaaataaattaccaaataatgcaaatattataagttttaatgaaattccacttgtacttttaatcttataattggtgtatatttgtggtattcttgaaactaaataaagaaatgtacatatccatgcaagtaatttaccaaattgttccttattcatagaaatgaaaaatattattatcatataaagtattgaattattatttttatcccctgtattattatcctctataataggcaccccctgaactttggaaatacttgatattaatgcaactgatacaatcttcttcaacccattggatgatgatgatatcgacattttcctctccctattactcccattcccactaccattactatttctaaatatcccctttactcgtatctttggtgatgttttatacttcggtgaatttaataattcatttctaattgtaccatcaatagatccaaaagtctctaaattatctcttaaactacttcttggactattaatatacttatccctaccatgtctatgtttattcttttgtttaggatgataccatttactttcaggattattatacattttggtataataataatattgaaatcctaaaataatatcaataatacaataataactactaagtaaaatttgaaacatcattgcattatttaataaacaactaattaaattaagtaaatcaccaccaaaccaacaaattaaaaataaaagtgaaaatccttcaattgatttatctgtaaaatttttaataacttgtggtaattgtgcaaaaagccaaaacgatattgacatatatccacttaaattagataatgaatctagtgttttgatagtattcgatgaaagttgaagattttgaaaaaaatttgatatccattctgctaatgtatttgatatcgatatcgatgatatcaataatattattcccataccaccatcatctcccaataccatactctcctaatataataccttatcataagaaacaacaaacaaaaccttcataaaaactatataaaatcaacatgttataaaatcattgataaataaagcttctctcgcagatccttcccttccctttcgtttcgtttctttttattaatgttaccgaaaatttatacagaattttatatattcacatactatatactatacaatattaatatcaggataaacttccttagagtatttgacaaatttgttaacatttaaatctaaaaatattggcccccaacatacaagtaatccctttgctctattaagtgaaattgtacgaaatacacgtacatagttttcatttggataataatttcgtgtcaatttttgaatataatataaatcagaattcttaggtaggaaaagacatatattctccgtatatttacgaagttgaagtattaaaatttctaatgaaaatggtaatagattattaagatcatatgtttcaacattaatatattcaggtccaccccatggtggtgatccaaatatacaatcaatcttaacatcttccatttgctctaaactattttttgattcctccttattcgcatataaccttctaacattatgtatttcagtatcaatattatatccatcaccaagatcaccatcaacattatccatatgatcatccccaacaactttacattcatcattttctgtaatataatacatccaattcaatgggagtaattttaaattatccctcctagtttcaccaaaatatacttgtgcattatgtttagtacaaaataaatgaatatgattaatatcagctgcaaaaacttcatcaaaatattttaaaaattgtataacattacctccaccacctgcaaatgcatcaactacacgtgttggtctatcatctatctctccaatacaatatttaattaataatgcagtaaatttacttattgattcaggtgtaacactaaaccataattcctttgttaatattataccttcatcatattttttgaaaagtctatgtctttgtttccaatatttaagcataaatccatcaaattgttcctgtttcataaatatcttgttcatattctcattggaatatttattattataaatgacaaaatctttctttactttctctttctccttatctttatcaatacttatatttgtttcattatcattatttatttgtactggttcattagacattaatgctatatccgtacttccatcttgaacatctaaacccataccaatcaattgtaccaaaacaaataagtaaataaacaacaatctgagccaattgtgttacaatttcgaatctcattttggtaacatgtttttttttcaccactggctcaaaaaggaaacttattatagctttttcttctttctttcttttctttctttcttctatttctctatcaacaatgtcaggatacactaggggacatatctgtggtgttgataattgtccttctagactttggaaaagagttgatggtagaaatgtttgtcaatatggtcatattaatgaacatgatattgaaataaatgatgatgatgaaatgatggcaggtggaggaggtaatggtggatcatcaatgccaggtgttggagattttagtagaagattaggtaatgttgccggattaactacaagtcaagcagtattaaataaagttcaacaattatcatcagagaaaaattcaagtagaaaatatggtgaagattttaaaaaattacaagcaagatgttatcaaattatacttgctaaaaatactaaatttattataaataaattaaatttaagtcccattcaagaagaatgttatattaaaattgtaatgactatatggtgtaaaatattagatgcatcaattaatcgacgattagatacaaaacataaatatgttgatattagttatttacaaataatcaattatctagcaataattcaaatgaatataccaatgtatttatctgattatattaatttaacttataataatggctttaatttagaaagaactgaatattgtttacctaaaagacttagaattcaaataccaatatctcaattaagttcatttcatggtcatttaaatttaaattattctaataaattaaattcaagatttattactacatatatgaaaaaatttattaaggaaactgaaattaattattatccatttctattaagaactatattaaatttatttttacctattgaaatttgcaaaatgtacaagaattgtgttgattttttcaaaattaaatttacatttaatgaaatgatgataacacatatccatcctgaattgaaaatgcttgcattattgataataattactaaaatatatttttcacagaaggaaaatagtaacaatttgacaaattggtatcataaatatcttaaatataaaaacagtaatgaacttttcacactaaacagtagttttattcatatgaaaaaagtaatatattatgaatcaaccttcgaacatatttacaattgggatcaatcatttgttgatgagtttatacaattttatgaaactagtatattacctaacatcagtgttttcaatattgcttcaagtaatgaatattcagataggaataaattaaaaattgccaaatctattaaagatttatttaaatcttcaattgatccacaaagagatgatgttgaagttattgaacaaaatcaaagtgaatacatggaatttctcattaaagtatataatgatactgatgttactaataaaactacagaaattgaagaaattgatattactaaaattgattcagttttaggtgaacatatattatgtcttttacaatgtaatcaaatgcaattatctggatcaattaaacaattaatcaaacaattaagtcatattcaacaatagagatacttttctaaaggacaataaaaacacaatttatatacaaaatttatagaccattataaatacttcattggatccttaggagctggatcatttttcaatgataataatactttatcccttaatctaaacattggttgtaaaacccaagtattataatgaagtacatttgtttgttcctttggatctctaataatattaaataaatatggtgattctaatttacccttaccttcattaacttcaggttcccaccaaagatgtaatttccaatctctccatttaattgcacgtaaatcatccttaataaaaaataaaaatccttccctttcagattttttattaattggatcttttaaaaattttaattgacttataccatcaattggtctatcatttggaattttaccattaattacatcaataaatgttgaaaaaatatcagttacatgaatcatttcatttgtacgtatattttcaggtataatttttggccatcttgcaataaatggaactcttaaactaccttccattgcagtatgataagtaccattataaaaacctgctgaacctctataaggttctctgaattcaggtccattatcacttgcgaatattaaaaatgtattatctttaatacctaattcatcaatatgttttaataattgaccaacacgatgatccatttcaaccattgaatctgcaaaattctcatttttagtaataccttcaaaatctccatgtggtaaagttgggaaatgtaaataaattagggggtgatataagaaaaaagattgtttcttgtttgtcattctattcataaaatcaatacttttattaacaacattttcatcaattaatcttctttgatctaaatcataaatactaaattagaaaaacaagaggttaatgaatcttcactaaaatggaaatatcaattatgaccatataaatctaggttgctttttttctttattctcttactttataatagtaatgctattttacacatcgacaacactttctataattattcgattatgataaacatctcttatctataaaattaccgaattaggcaactcctgccgttcatgttagattttgaaggattggttaaacaagttaccaagacaaacatataaatatagattaaacccgcagtttcccacacggtactcaaagcttaatttacaaatactttctttcttcaaaacaccaaccaaaatgattcctgaaaggtatgtacactctcaaataacttacatataaaagaggtactaaaacccaccctttaaaagcagaagaaagagctaaaattccagctatttggttaagtactttccgatcaactggtgaagagttttacaattccggtaaggcagctttagagaatggttacactcttattgatacttctagtatttatggtaatgaagaggcggttgatagagcaattaagaatttaggtacttcaagagataaattatttattacaactaaattatggtgtgctgattgtaaagaacctgaaaaagctttaagaaaatcattaaataaattagatttagaatatgttgatttatatttaactcattggccaattagtattcctaatagtggtggtttattaccaatgaatgataaaggtaaaagaattgctataccatatgatgaatggaattatattgatacttataaatgtatggaaaaattagttgaattaggtttaactaaatcaattggactctctaatttcaatgtaccaaaaataaagaatattttaaataaaaaagaaattaaaattaagccagtttgtaatcaagttgaaatgcatccaagtttaccaccaattgaattaaaaaattgatatttcacctgcttgtctagcaatttcttgggctgttgcaagagatactgtcgttttaccaaaatctctcaatccacagagaattattgataatattaaaatcgttgaattaaatgaaaatactgttaaaaaaatagaatcaattggtattgaaattcctcacagacttgctaatccaccttgggatgttaaaattaatgttttcgcagattcagaagttaattaaagttaattggaaaagttcttatatttatatttttgataaaaaattatctaattgatcattctttacaattatattatcaattaaattttgataaaattccataccattatttaaattatttaaacattcattaaatccttcaaatgtagattttaaaactttaatagattctaatcgtttatttgatattttaacattttctttatttctattgaaatctttgaataggttttcaaattgttgatatttttcaatcttatcttcattgaattgagtaactgtatccacatctttggtaaatttgaaaattaaattcttcaatagttcatctaaatctatgtccctattatttctataattttcaaaaatatcacattttttagccttatcgtttactttaataattgtattatcaacgtttttcttaaattgtttcaatgattctataatgtttattaaatgttcatacttctccttaaatttaggattaatctccaaaacattagatgaaggtaagtactcctttaatgaatcttcagaattataaatttccaaaaatggttttaattcattaacttgagtatttattaattcatcgccatcttcactctgttttatataattttcataaattttaaatgaattaatcaacattgaaccaactgggtctttttcaatttttttcatatcatgttcatttattttagtccaggtattatctaaacttaaacgacattttgattttaaattagttaaattttgatataattcattaattatttcaattccaccattttgtaaaatatgtgatttttgttcaacaataatgggtggtatttgatcatcattaattgaatcttgaattattttttcattctttaataatttatcaatttcaattgatatttcttccaatggtgatattaattgttcatttatgaaattttcaaattgtttagaacaatctaataattgtgttactatagtatatggaatcaatgaatcaaatatagtttcatcatgtagatgattaggtattagagatttaaccaatataacacgtggtagttcaggaagtgtattaaatggtttaactaatgcatttgaatccatttccatttcaatattcaatttcaatttcaaactttcaaaatcttgtataattttggtaaattttgaataattttcgtaattacattgatttattatatcctttgattctaaaatatacatttgaccaatagatttattacttttaataaaattaatattagcaaataaaatatatgagaataatttaaaataagtaaacttgagataattataatcattatcaatacaatcattataataatctgaaatttgcattgatattttaattaatattgaatttttaaaattatcaaattgtgcctgtaataagtaaatttcctgtgattgagccaacattaatttcattaaatacgtgtatgtatcatttaaaattgacaaacaaccaatacaatattgtgaataaataccggattttttataatcttcattacgtagttcaataattgtaagtatcgaataatatgaacctaattgataaattgatgaatcgatttcaaattgtaatgaattatcaattttatcatcccattggaaattaataacatcaatgggtagtttatcattatttaatgagtttaataatgatatatattttttcaatttgatgataattgataaattaattgtccaaatgtcattcatatctataaacaattcatttcttaaatcattcaataattgaattgtctgtaaataaggtttaatatcttgatttaattcaatttcaaaaactcttttaaaaacattaactaaatctacctttactgtcctcaatggacgtaaatacatcataccagattcatcatcatagatctccatacctacaggaaaagaaaatagagttattcaatttataaacatcacgaaatttccaacatgtaattattattttcgtgtacccaacaccaacttcactcttttattaatgaacaatgataacgggtttagatttgctacgtaatcaaccaatacattgcactactggtatagataaacttgatggtgatggatttgatgaaggtatttatgatattagtggtagtataggatatggtagtattggagtttatgagattataattgaattaatgataagcaagttaggaaatggtggtaaggtattatttattgaaagttataataagttcccatggtttaaattagagatgaataaaaggtacgataaaatgttttcaaatatggttgattgtattagtattgataatttaatggaattaattatattaatgaagaataatgataggttattagataattataatatgattataattgattcatttaatttaatgtatgaaggatttattgaagaattaaggggagaaaagagtaaatatgagcaatgtgttcatttattattttatcaaatgaataaattatgtgctaatgggaaaattatgtttactattggaggtatgagttcaataagtcaacgtgtatataaagaggaggaaggagaggaagatgaagaagaaggagaagaatctagtgaaggggagaatattgttaataggtatattaaacaagatatacttgttccaacgatatcattaaataataaattaaatatttattataagagaaggattataatttatagggattggatttatgatgatgaacaattgagtaattgtgaatatatatcatttgaaagagatgttatacgattgactgagggtaagattaaatgtgtaccacattatataagtataggagaaggtagtagtgtttgtggatttttcttaattagtaaaacatttgaattaattgatattgaaggtgaggtgaatgttgatgattatgaagttactgataatgatatggatgttgaaataccagattctcaagaatattaaaattagatattaaaattagatattaaaattagataatagaattaaatatatatgagaataacaaatatttatgattaaaataggattaaaattaaaattaatttaagataagatagataatgaacaaaacaaaaatagaaaatagaagataaattataattgaataaacgaatgaaggtatattaattaaaatgattataataaactattcaaatttttcattatcttcattaccttgattataatctaagaaagtccagaaataccaaataccagcagcaattaaagcaccaataattggaccaatccaataaatccagaaataaacagggaatgaacgtttagcaactgctgcacctaaacttctagcaggattaatacctgcaccagtatatttaattgcaattaaatgtcccaagaataatgataaaccaattaaaacaggagcaaaatcattaaatgaagatttttcaacaactgtcattaaaacagtaacacaaagtaaacaagtaacaaaagcttcaatcattaaacctctaccttttgaacaaccaccacctaaagaattagcaaaagtaacaggaccaggagccattgcacttgctgcaccacctgctgccatacctgcaataatttgagtaaccatcatacataaacctttaattggatcaacaactttagttaaaacaagtgttaaagtaacagcaggattaagattaccaccagaaactttagcagttaaagtaataccaatcataacaccgaaaccgaaaccaattgcaataactaaaattttagatgaacttgaagtatcaactgaatcacctgcattaacaacggatgcaatcatataagcaacccaaaggaagataaaagtaccaataaattcacctgaaataacaacaaataaattttttggagaaccttttaatttccaatcgaaattaaaacgtttattagagcttggttcaggagcattggatgaataacctaatttttgttcaggatccataattataattaaagtagggtgttaaaagaaaatgaaatgaaagcaaggaaagcaaaataaaataaaaaataattaaactaaaataaactaaattaaattaaattaaattaaattataaatatatgggcagacacagctacatttatacagccattgcagacaacccaataaacaaacaattgcaactgacatgcaatgcctaagttcaaaagagaaataacagaaagaacataaaatagggttaaaccctatataccaatttaaaatctcaccttctttttctgcccgctctctcctattgtctctctactcattctctacttattctataactatcctattgtcccaaatcgttcttcctcttctacaccttctatcagggtttctctctctactattatactttagatactactctactctacaaccatctagtaaattgtaattataccaaacatatcctcctatgtaacattgagcatgtcaccagacaccatcaccatcaccatcaccatctcattaaacctgtccttaaaagcaatcatatcttttactcactttattatcaccatttttaaactttatgtacatcatactagtcactattgtctttgtttcaactttccttcgttaatacactattaaatatatcactctattgttgtctttttgccgttttgggcttttagttaccgtattcgtatattttggtgagtttctttctaattattttttattatttttattattattattattatttattatctaaactactatacaaattctagactaaaaactgtcaaaatgttttttaacatcatcatcattatcaacaactgcaaatgtgtcatctccatcttccttctcttccttctctatcttatcttctatattattactactactaactggtggtgatccagtccatataattttacccttttcattaaatgaggcattttcatcactaatttcaataatctctttaaattgttcaattattttcttactaatacccatttcatctcttggtatccaaataacttgcattttgtcatctaaaaatggacaatcatatctaccaatactctcatcaattgaataatattcctttggtatatacattcttaaatcatgatatgttaaatatttccatggttggaaaaattgaattaatttattaggtttattcaattcagttctatctccttcaattaataatggttcctcaattaatctatcggtatcttccttctcatttaatccattatcccatgaaactgtattactctctccgtctaatggtttcatacatgtatttggtaaaactgttaataatttatcatatgctaaattcatttgaacatgtgctaaaactgtaaatcctgtaaaaattgcctctaaaacaatacacccccaactctttgaaactgcaaataatccaattaaacaaatttcacctaaatataatccaacaaataaatggaaaattgcccttggataacttttacccatcatttcaattccaattccattaacataatttaatgtatttaaatatgtaataaatagaaataaaaatgaaacaaatgtaaataataatataattggggaaataattgaatatgcaattgaaatagttgctaaaacttcataacctggatataatgtaccccataattgtccaccaattgaattatatctattatatttacttctaactgttttatccataaatgaaaaaacataaaataatataaatgcaacaatttgaaataatgtaccaccagcaactgagaaaccatttaaaattatatatgaaatgaaaaaatttgatgattttggtaaattatttgataataacgataatgcactcgttggctcttcaataatttgtgttacaacagttgaaactgatgaagaaattgttataactaaaaatgtttgaacaacttgaaatgcaaaatatgattgttgagtaaaatattcaatttgttgatttgtaacacatccagataatttacccattgtacgtataaatattggtaataacatcattaaaactgctaaggcaactgatggtaaaagtgatgtaattaaacctaataaaactttaggtaaatgataaataaatctaagccaatgcattttatttgttaaataagttaaatttgaaataaaaccaacgaatgcaactggaattgcccaaattataattaaaaacacaattaatgcaattgcacctgataatctacctaattgttcccaccaaaataatctcatatttggccaaaaaatatcacttggttcaacaccaatatgttttggattaaaatgtaatggttgatcatgaacaattacttgataagctaattgtgcataatattgattttcaaattcaactgtaattgtatttaaaggttttaatgaattatttttattattttgtaattcattaatttccttattcaattttggtaaattttcaatacaataatcaattaaatcatgttttttaccaataaatttagtttctttaattgttggcattttcttttgtggaatatatgaaacaatttcatctttcagattattatcaaattcatcaggattttttctaaattttgaaacacatttaattaaaatactattaagattattttctaaagtttgaattaatgaatctcttttattaacagttttaattaatttacttgaaacttttgcaacccaaatatttttaacaccttcaaataattttttaaattcatgttcatttaaatattgatcaggaacagtttggaaaataacagttcttgaacttaatttagttgccatataaggagttgattgaactaaaattttcaaattaccatagaataataattctctataaattgagaaaataattgcaccaaaataaatccaagaaacgaaaacatgagcataatatctaccaacattattacaatttgaaatagataattgatttaaacctgtttcaccattaccaccagtagcattaacaggtaaaagtataatccaaatgaaaataccaccaaatccaaatgatgaaattaataaaaggtatcttaaaaataaataaccatcaataccagtatatttaataattaaatgaggacattgccataaatcatataatgccctaaaccaatcaattggagaaggtggtaatttaggtggttgatcttcctctggtaataaatctggacaagttttaggttcatagacacgtttaaaacgtaaacgtaagataaagaataaagtaacgaaaactgcacaaactacaccatttgagatgattgcagtaaggacatcttgagttgatgtagatgtagcagtactagacattgcagttgccgtttaaactagggtggcaaaagaaagaaagtgtagaaacaaaacaaaacaaattgtaaacagggcacaaaacccagatcaatccaaaagagggaaaaaaagaggcaatttgaagtggaaaaaaaaaatatttttttctaaaaaaaaagaagaaaaaacttccttcgctactgaaaacaatagaaaatggtacctgaaacaatagtgatattaaatgatataatgattacaatattatgactattattgactattatgacttaatattataaatttatataaaatattcagcatctagaactgtctcctctgaacctccaaatacaacaaattctctatttaatttttcatcaatctttaaaactgctgcaacattaccacatctaccacaataatttggtgctgaccaaactgtaattacacctccattaaaatgatccctaaatccttccattgctaattgatgtgcccttgcaactccattaaaattattttcatgtaaaaatctttcaactgctaatttaccgaaaaggaatccagctcctcttggtgataatgcccattcaccttccattgaatcatcgggatctgaccaaagtaaatcacagattggtccctcatgtggtacttcatcacatctatcaatacatcgaatttcattaattttactaatcattggtgataatcctccatgaacacacataatagaattttcaataactgcaactaatggtaaataatcaaataatgaacaacatcgtctccaaatactactaccattagaaaatttccttatacattcatcataaaatccataaactgctgtaatttgtctactttcatgattacctcttaataatgtaaccatatctggatctcgtacctttaatgaaattaataataataatgtttcaactgaatatgctcctctatcaacataatcacctaagaaaagatatggtcctttactaacttcattacatatcgttactaaatctggtaattgtccatgaatatctccaataattgtaactggtgcagaaatgggtacaacattaccttcacctataagtatttcctcacataatgataatagtaaaaaaatctccctctctgtgggcactttcatcactttcaactgctctattataccatctatatccatattttactgtgtgtgtcccttattccaatagaactacgtcaaatataaacaaccgtgtcgttaatgatgtcgtccgatttattatatttagtatgagattacgtaacacaatgctaaaattcaacaaagattacgtaaataatcaatgtaccacttatacaacagtacttcttctataacaaccacactgcaatgacaacaaaaccattggtgccacgaaaaccatctacattgcaatgcaaacagaaacgcccccctgttcctaaaaaaccaataaaacttacatcaacagacataactacaaaaacgcatacagttactaacgctagaccggcaaaaccaacaataccaacaaaacctaaaatacaactaccacataaacaaccacccccaacacctaagaaatcactaaatgcaatatgggcagtagctgcacagagaataacacatcgtcacactttaccaataagtacttttccttataataacaccaataccaatactaatatcaatactaatatcaatactaataccaaaccaatcgcttttaaaccaaaacaggaaatccaacgcagtaataccactccatctaacatttcacatcttaccaagactcgttcaagaggtcctaaacgtcgactaccaactaaagtctaatactagtacttatatactatttcggtttacctgcctaatcgggtaactgctttccacgggttacatgattttatcaccaatttttaattgaaatctgattgcttagtgttatgaatctttttacagaacctttgtatagaacaatatagacaattccactctctttataatataagtagaatacaatgaaacttgtaatctggccattactagtaactttaattacttcaatatatttcatatacagttattttataggtaattcaaatataataattgataatttccctgatataataaatacttcatatattgatctactaactgatgcatcatcatcaccaactggttggaacgatggtgatagagtattgttcttagtacctttaagagatgcagctgaacacttaccaatgtttttcaatcatatgaaaaatatgacttatccacataatttaatagatttatcatttttagtatcagattcaaaggatgatactctcggtatgttaaaatctcaattaaatgaaattcaatcgagtgatgatccattaatgccatttggtgaaattgaaatttttgaaaaagatttcggtcaatctgttggtcaaggattttctgatagacatggatttaaagctcaaggtccacgtcgtaaaaatatggcaaaggcacgtaattggcttacttcaataagtttgaaaccttatcattcatgggtttattggagagatgttgatgttgaaactatacctccaacaattttagaagatttaatgtcacataataaagatataattgtaccaaatgtttggagaccattacctgattggcttggaggtcaacagccttatgatttaaatagttggcaagaaagtgatggtggtttaaaattagctaaaagattagatgaagatgctgtaattgttgaaggttatccagaatattttacttggagacctcatttagcttatttacgtgatccttatggtaatccaaaaactgaaattcaattagatggtattggtggagtttccatattagcaaaggcatcagttttcagaatgggtgcacatttccctgctttttcatttttaaagcatgcagagactgaaggtttaggtaaaatggctaaagcaatgggattagaagttgttggtttaccacattacgttatatggcatatttatgaaccttcagatgatgatattaaacatatggaatggatggcaaaggaggaaattagattagctaaatggaatgaaattatggatttatattataaaaattttaaaaattcatttcaagaaattaattttgatgattgggaaaatgaaaagaataaaatgatgaaaaatagtgatccctttaaacttgataggaaagttattgttgattggtctgaataattcattttctataaataatattatttttagttgtttgtatatatacatcattaaatatctaattaaaacttacgttgattcacctttatctctcttaaatgcaaaacttaatttacgtgccatgaatcctcctccacttccaccactaccactaccgctaccgcttccactgccgcttccactgccactaccatgtgcattgccattaccatttgtagcatcttcaccactttctaatgatgcactcattgaatttcttgaaccagaaattgcacttactgccgaacctgctgaaactccagaaacaatggaattctttctttgtaatttaaaaaatcttgatgatccaaaacttgtactcttttgatgattagaaacgtttttactaactttatcattccattcattaccatgttcattatcatgtttactatgatcatgatgtttattgtcatctttgttattatgaccttcatctttatgatcatcccttgttggactactaccaaatttaccaatcatacttttcagaaatgatggagatgttggatgtgctttattttcaatttgttcatcatttttatgttcattaattgatattggtgcatccaagaatgaaaattgttgattttgaatatcatcaatattattaacattcatattcacacccatatccaaattactagtatttggatttaaattcataacatcattcatattcatgttcatattcatattaagtgaatttaatgtattgattgaatttaatgtattaatattggaatttatattagaatttaaattagaatttaaacttgaattcatgtttaatccattcatattaattccattcatatttaaactattcatattcaaaccatttaaattaaaattattcatattcaaaccattcagattaaaattattcatatcgattccattcatattaattccattattcatatttaatccactcatatttaaattatgcatattaataccacttaaattcatatcaattccattccaattattattattatgacttgaatgatgtccatgtccatgtccatgatgatttttattattaccactactccaaatactactaccaaaacttgtactacgacctcttgaaactgcaaattccatacttttctcatcaggtatagtagaattattactatttaaagtattgaagatattagatcctctatcaattttattatccatttcattttcaccattatttaaagtattactcaacatcattgaaactggatcaatttcatttgatatacttgcatttggttctaattttttagaatcaaatggtgatgtggtagttatatcaattaaattattgattgaatgtggtgaatccatacttgtaagattaacaatttcattatttaatgcacctaatgacgtaactctatgatgttgtggtgtggaattattcattacaatattattcattgatggattatataaatcaaatgaattgatttgtgataaatttggtgatgttgctaatatattattattacttgtatttgcagaatttgtattatttgaatattgagtatttggtggaatcattgattgagaattaaaagcattaagttcaggtgataaacctaaatagttgttattattattgttattattattattggaaatttcactctgtgaattagcagtagtattggcaggagtaccttgaaatgaaccgtttgttaatattttcggacgtaaattttgaattgaagacatattcgaatagttaaatgcttgattcgatgatgatgatgaaactttgttttttgatataatggattttttatttgaatcaccttcctctgaatctatctcagaatcggtttcatctggggttatttgtttattaatgttgatatttgaattaagcaggttgttacttgaattaactgcaatattattacttgcagattgtaatgagttgtaaaaatatccattagcattgatattattaatagaagttgttgggatattgttaacattattattattattaataatgtttttgatattgatattattaacattattttgagatgataataataaatttaactttttctcttcttcaatgtcagatttcattttattaaatttaatccattcagtttgttgtaatgttttataatcagattcagccttagcatcaattgcaacaatttgatcatataattcatctttccattcaggttttaattcaaataaaatctctaaatttttttcaccttccttatttaaaacacctgtaactttatcaatattcgcattaataatttcaaataattcaataattttagattttttaatttctaaagattttcttaattgaatttcatcccttaattcatcttcatttatatgaacatcagattgtaatgaaaaaatttctttattcaaattaattatttcactctctgattttttcaatgattcaggtgtatcatttgaaataaattttttctccttattcattaattcaatttccatttcccatttttcaatttgtgtattaaacatttcaatcttctttaatctttccttgatttttttctcctcgacagatattctagttgccgctttaactctttgctcttctaacagtttaatctcttgacgtagattcattctattattatcctcatatttcctcctatctctagcttcatccctagttgctaataaattattttcttcttctttaaattcattctctaaattttcatatgttaacattaatgaatggacctcctccagcccactctctaatatccatttcagttcatttatatcatcaattaattgtggatgctttttcttatcactaaccactgttgtatttgaatgagtgttattagtagtactattattattaggattattaggatttgcactattatcaactgtaccacttcttgatctagttgagattatattaacagatgacttgaaggtatcatttttagtcagtgaagctctctctctttcacgtaataaacattgaataacattatcagtattttctaaactttgtaatccatccattataattggctttgcagcagttttgatgaaaattggcgaacttcttgatctataaccatctttattaaaagctactaaatctatttgataatttgatccaggttgtaatgataataatgtacattgattatgtttaccatcaattgttaatgtttcaattccattaatatataataaataatatgatataatagattcactaagtcctgttaatccattgttttctttcttgttatcatttgtggaatttgatgaatcactatttaaatgttctgcatcccaatggaaaacaattgaagtatctgtaactttatcaacagataataatggaattttaggtattggtatattaagagtttttattgaagtttcagttgataatgacatcaataatgataatctattagttagccaagctagactggctagcgctagtaatattatgaccatcatggttcgttacttaatgaagagatttgtgaagatgttgatactaacaccctggggcaaatcaagtctatcaaaattattacgtgaaaaatatcgacagcgttttggtattgtgagagatcaagttttagagttttttattttaatttattttgtatattgtacaatatctatttaggttatttagaaaagagagagaaataaagagtgtatatctaattttaattgactaaggtcttactagaagatatagatgctgaacgataaagtttagctgcaccctttgtaatataaggatttttcaaagaatcttgataagcttctaataaagctaattttaaattttcaattgattgaggagaattttggaaatggaatgcaattctattacccattgttttaacattatattttttagaaataacatcataagtatgtggatttattttaattttctttgaatctaaaaatacaaaacttgtatcaactggtgattctaatggtatattattttcaatacaaaatttaccaaaatcttttgcataatcatgagattttttaattttatctaaatttgaatcaattgcaattgatgccattttagctaacataccagcttgtcttataccaccaccattttgctttttaaaatgattacatttttcaataaatttcttttcaccaacaagtattgaaccaaatggagcaccaattgattttgataaacaaattgaaactgaatcaaataatttacaataatcataaattgaaataccagtttcaacacttgcattccataatcttgcaccatcacaatgtagtaaaataccttcatttttacaccaatttgaaattttaacaatttcatcataaggagtaattataccatgtaatgtattttctaatgaaattacctttgttggtgccatatgaatatcaccatcatcaggtatataattatctaaaatatcatctaaagttaaataatttttattagcaggaataacaggtgaaaccattgcttgtgataaagttgctaaaccacctgcttcatgagtataaatatgagctctataatcacataagattgaatgaggtggttggaaaagatgtgctcttaaagcaatttgatttgacattgtacctgaagaacaaaataatgcagcttccttacctgacatttcacaaagttttgtttctaaatctaaacaatcttgatcttctttataaactgaatcaccaactgaacaagttaatactgattgtaacatttcttgtgttgggacagtgaatgtatcacttctaaattcattatgagttgggaaattatctaatgtcattttaatgtagtgttttatattatattaaacctgttaattgaaacagtaaggaagagattaaaacaagagaaagaaacctaaattgcagtcctccatcaaaagggagaaatagaatagtatttataaccaattgatgagtaatagttgtaaaccatacaatgtacttctggaatatccgattgactaatagataataacggaaagtgcctttttcagtgaaaattctcatcggaaaattcgcaaaataaaaaaacagtgaaaaatcactaaaattccgcccattcgagggaaatcatcgattttcaaaccattattataagatcaatttaaatgataataagtatctagaacatggtagatatgggtaattgatatcaaattttccattttttagctcatattaaatgaattgggttattttggtgtaattattgatgataataatgtttaatcatagtaattcatattaatttgagggaattaaattttttcaattggatatcggaaaaaagtggatatatgatggtgcggatgttataattaagagggtttgattagttaaagaaagagggttaattataactaagtgaataacataatagacagttagatagacaatagataagaatagtataaatataagacaagatgtaagttaagaaaagttgtaaaaggaggttagaagtgattaaagtgatgaagatagtgaaataggggcaatatggggggaatataactttatccggagaagttacagtgacttctgtaaaactatagtgacttctaccatttttatgtgacttctacaatttggatgtgacttcacctgacttctgctgacttctgctgacttcggttgacttctacttaacttctaccacacaacgtacggctgtgcaccatggtatcattgacttctccctgattttttgacttctcgctatttttttgactccagttgccaaaacggcagtcaacccggcagtttctttacttgtgtgccaaaaattaaagtcacgtgcttgtcacgtgatcctaatattttgaaaaagtttactgttactactggtattagtataatactgaaatactaatgaatagattactaacaatatttacaacatatcacaatacaataatacactctaataacactaaacctaagtaagataaaatttccgaattgtatcatttcttttttcttttgctaaaaatgtctatatagataaataatttaatgttaataataataataataataaataatactagtagtaattacatacaaacacaattaagcattaacttttcttacaccaacatctctgaaaactgaatcagcttcactataacctcttccaagtccaaatccaacacctaaccaaacagggaatgatcttctcttaaataaaagtactgaaactaaaacacctgtaccaaaacctaaaccagttttaacaattgcattagaaattgctgtatcccatgcacttgaaacaattgatgatgatggtgtattagcaattacaggtacttgtacttgtgttgtttcttgttgtgacattgtttgtttagtatattatattttaaaacagtcaattactccctggtaaccaatgatgaaattcatgtcctacacttaataccattacatactaaacaatcaagaaaagcccaaacgacgcgacggcccttctggtgtacagattacttttttcaaccaataaaatttcattttctcaattaaaatttccacgcgctacatcaatttcaaatcaaaattccatatttttttcacctcgttttggttcccatttggcaattatttattgttgaacattgcaacggattttatatctaatttcctttcgttatttttttattatttcatttctttttcttttcattgaacaaacatgtctgcatcatctgcccctgttatcccatctttcacagttttagattactctaaattcgcacttgctggtgcaatcggttgtggtattacccatggttcaatgactccaattgatgtcgttaaaactagaattcaattagaaccaactgtttataacactggtatgtttggttcattcaaaaaaattatctcacaagaaggtgcaggtgctcttttaactggtttaggtccaactattactggttattcaattcaaggtgctttcaaattcggtggttatgaattatttaaaaaaatcttcattgatgctttaggttatgaaactgcttcaaattataaagatgctgtctatattggttctgctgcaattgctgaattctttgctgatatcgctttatgtccattagaagcaactagaattagattagtttctcaaccaactttcgcaaatggtttaattggtggtttctcaagaattttaaaggaagaaggtttaggttcattctatgcaggtttcactccaattttattcaaacaaattccatataatattgctaaattcttaacttttgaaagagcaaatgaagctatctataactttatttcaactccaaaggatcaattatcttcatctgcagttactggtgttaatttattatctggtgtcattgcaggttgtatggctgcatttgtctctcaaccagctgatactttattatcaaaggttaataaaactaagaaagctccaggtcaatcaactattggtttattaggtcaattagcaaaagaattaggtgttatgggttcattcgctggtttaccaacaagattagttatggttggtactttaacttcattacaattcgctttatacggttcaattaaaggttacttaggttgtcctccagttgttacccttggttcatcatcccattaagttaagtaattgttaagttattttctttatctatctatatttatattattatttatttaacttattcttgttaattaactgtattcattatattatattatattatattatattatactacttaatttatacacatattaaacaactggttcttctgtttgttcttgtactggaacttgttcctctaccggtgcttgtggttgttcttgaactggaattattggtacatattgttgttcagattcttgcattggttcaggttgaaaatctgaattaccattcatataagaatctaattcgttatctaattcatcaatagattttggtttaaatttcttttcatttttctttttattattattattattattatttttacctttattattattctttttaattggaccaatatcaataccaattctatcaattaatggagtatttaatgaaacattaataacttgacctgcagctaaacgtccatcaaatttatcaactgctttaattgcatcatgattatgaagaaatttaataaatgcaactccaacactttgaccttgagtatttaattttaattcaacattttgaactttaccaactgtattcattaatttctctaaatcatttgatgttagatttggatgtaaattagtaattttaatttcattactactaggacgctttttgaatgtttgtttattattattatagttgttactattatgtcttggtttggaaatcattgatttaccattcttacgtttattattgttaaatttctatattaatctgttagtattttgtatttttatgaataatataattatatgcattacatactcttttacctgcatccttaccgataattgcatctaatgattggtctaataatgatgacatccttgtctgcagaataaagaaatttgtcacaccttattatcaacaatttgtgtcgcccaatatataaatttcctcaatctcacatgtgttcatgttaaaatttcaaatttcacggatatataacttacagaacatttcattacattaacactttactttctttcaatcgaactattacttttacatttaaaaaacaaaagggaaaacgttatataagatatatataatggcacattatcattctttaggatattcattattaagatactcacttgccaaacgtccaagtgtatctaacatgtgacctccatttgtcggagataagatttgtgcattttgtattggagttgcagttgatgatatcgtattagtatttgtagttgtattattattattaatagatatgggcagtactgaagatgtatttaatggtgacgggagatatgaaaatccactattattattattattattagtggtattatttcttatacttgattcaagtattgcaatatgttcacgtaaatgatgattttcagttaatgcaactttaagtttttcatttttaagtgtatttgcatatttaattaattttaaatttcttgaagatatttgttcattttcatcttgaattattcgtaattttttctctaatccttcaatttgtgctaataacatatatctctccatttgatattcatccttacaagatgaaatttcatttttcaataatgtatttttcaaattcaatcgtagtaaaatatttttaattgattccatcaattgtatattatcagaattattattcgttttatctctattattgtcaataatattttcaattttcattattactttagcaacttcactatccatttgagttaaatccattcttaattgtgactttaataaaggttcatcattacttggactactacctgatgatcttgatgaattctctaaacttaaatcaccattattaccattaatttgaacatttaaattttcgtgtccattttcgtgttcactaacacgtccattaatacgaccttcttcaacattatcaacattcattacttgatctaaatgtgtatccattcttggagattgtagcaatgtcggtgagacgagtatattagctatatgttcctgttttgtgtccattgagttactctacagaaataaaagttataataaaaaagacgtgtatatatactgatagcaattttactacaccaataaaatattaacgtgtaatgtcatactgagatttctcccatagaaggtccccctataacagaacaatttacccccttaactgcccttcgcgttgtttatgttaaggccactgtgggtgattactgggaaggaaggtaaggtattcaactacctgtctatgttctatatttataccctgtattgggataagagatacaagatagtaactaatcttataataaagtatagtgaagtaaagaattggaaaagagggcaatttaattacgtctttcatactacttctttctactggtaatggtacttgtggtgatatctcattatatacctgatatacctgcaattactcatatagtagtgttgatatggttatttccactatctgcattgttcataatactattcggaattactttattgtatgtattggaactaaaacttactttttttcatcagaattattactaactactacttcacagaattgatcatctcacgggttctccactaactaatcgcttgaaagtactactatatggtgatatttatgaaaaggaagtttattaacctgtacgaggttattacttaacagatcgtgtctcctaccccattgggtcactctgaaatatttccgttttttaatatgggactctgcgcatgtttcccgatgcggtaactcttgcgattatgataagattacattcaagatatataataagatattcctacatgttatattataaatactgatagttatacctcatcatctcttcatatttcccatttctacaataaacaaaaggcaaaatgtcttttagactgaccaatgttttgaaaaaagtgacatcaaaattctatattggatcacgttcatttgtaacatcatcatcatcatcaactagatcatttaaatacaagtcattatcttcatcttatctatatctggcattggctgtatcaacttcaactttactttacacaacttctccaactgttctcaatgactctaagaaatcaaaaagaaaaatcattgtcattgaagatgatgacgatgaagaagatgaagaaactgaagaagaaagagaagaacgtttagagcaggaacgtctagaaagagttaaaaataaaccttcactctctcaaattttcaatatatcagattttgaatatgttgctaaacagattttaccttatggaacttggggttattattcaactggttcagatgatgaattttcattaagagaaaatcattatgcctttggtagaattttcttcagaccaagatgtttagttgatgttaaaaatacaaatactgaaactgaagaaatctttggcattaaaatggatgctccattttattgtactgcatttgcaggtgctccaatggcacatcctgatgctgaaaaaaatttaattaatgcttgtggtaatgagaatattccttatttaattcctttccaattatctttcccatttgatgaatttatggaaggtgcaaaaccaaatcatcaaaatttccatcaagttcatttttataatgaaaaacaattagctgaaggtcctgcttatttacaaaaaattgaaaaacaatatccaaatatcaaagctttctttataaatgttgatttaccttgtcttggtaatagagagaaagattctaaaattagagcttcgttggatgattctgtcaatgaagatttatcagtttttgcttcatctaaagtctcatatttaaatataacttgggatgatattaaagttttaaaagaatcaaccaatttaccaatagttttaaaaggtgttcttaataaagatgatgttttaaaagcagcagaagttggtcttggtggatgtttaatttcaaatcatggtggtagacaactggattttgctatgccaccaattgaaattttggctcaatcaagaaaattattacgtgaaaatggtatacctgacaaagattttaaactgtttattgatggtggtattagacgtggttctgatatcattaaagcaatttgtttgggtgctgatgctgttgggctaggtagaccgtttttatattcaatggcaacttatggtcaacccggtgttgaaaaggcaattcaaatactgaaaaatgaaatgattgcagatatgaaattacttggtgtaactaaaataagtgatttgaatgaaaattatgtcgatattgaatctttgaaatataaaggtatttcatcatctgatcatttatacaattataattatacaaatattccaccacctccatttagaagataagaattttcatatagttattgttcattcatataatatttatacgtacatgtaaagaagtaaaattatctagagtgtatagattatataaaacatagaatagattatagactaataaaattgttccatcattatatatcagcagcttcatcccttgaagctgtagttacagttgttttatcccaacctaaacgtttatttaatttttcatatttagctctatccttatcactaactgaaggatttgttgaatttaatgcattatcgaaatcatttgctgtaacttcaacatcagttacatcatgattatcttcatttatattttcatctaaattttgaatacctgtgaaaattttccttttaagtgcaataacactggcttctctgaccaatgatgataaatctgcaccactgaaatttctacatcgttcatcatgtgcaatattatgtaaatcaacatcagatgaaattggtgtaccatttgacttaattaaagttttcataatttctaatctttcatttgcatttggtaattcaatataaagtgttttatccaatctaccaggtctaagcattgcaggatcaatcatatcaggtctattagttgcaccaataacaaaaattcctcttctattatttaatccatcaagttcagttaataatgtattaacaactcttgatgaactttcacttaaacttgaatctctacgtggaactaatgcatctaattcatcaaaaaatataatacatggtacacttgcccttgcccttgcaaaaacttgtctaactgatctttcactttcaccgacatatttatttaataattcaggtcccttaactgatatgaaattagcctttgattcatttgcaactgctttagctaataatgttttaccacaacctggtggcccccacattagaacacctgcgggtgcactaataccaacacgtaaataaatttcaggacgtttaattggttgaacaatagccatatgtaattcaattctaattttacttaatgcaccaacatttgcccatgaaacatctggcacggttgcaaaaccttcacgtttagcagttggttgaatagttggtaatgcagttaagaaatcttcacgtgtaatggataatggttcaagttgttttgatgtaagtggttttggatgtttttcaaggaatttttgaataactgaaagttcctttgtcgttgatgttgttgttgaatgaattggtgatttaacttcttcttcaagtaatgatgatgggttagatggtgttaatggggtagttaatggagtttggaagttttcaatatcttcatcattttccatttctatatccatatcaatttgttcctctaactctgatggtaatttaccttcagaatctgataatgaactgaaaattcttttaattgcagcaacaccagcagatgtaaccaatgcctttaaatctgcaccaacaaaacccggtgtcattttagccagttccttcaatcctaaatcaccggatatttttaatttactcgtcatactttctaaaatatgcattcttgcctcttcacttggaacgttaatactaatctctctatcaaatctaccagctcttcttaatgcagcatctaaactatcgggacgattagttgcaccaataacaataactggtttaccattagtattttctaaagttaattcatccatacaagttaataattgtgcaacaattcttctttccatttctctttgtgcaccaccatctcttttaggtgtaatggcatcaatttcatcaataaatattaaacatggagctaatgattttgcttcatcgaataattcacgtacttttttctcagattcacctgacataccactaacaacacttggtgcactaatatttataaatgagacacctaaatcaccagctaatgcattagcaattgttgttttaccacaacctggtggaccatgtaataaaacaccacgtggaggttgaatacctgttgatgtataaatttcaggatgtaaaactggcataccgacaacttccattaattctgcaaaaacatcatctaaaccaccaagtgatttaagtgacatctttggtggtgacctatctactttaacacgttttttaccattatcttggtctttattacgtcttttctttgatgattccttcggtgattccttggattgttcttgttccttttctttatccttaccattctcactttctttgtcttgttccatgtttttccataaactaacaatagatttattagcaagatttaaatcagttacttccattaattcatttactggagtatcatttgatggtatgtcagaattatttaaacctaatgttgacatttcctcagcttcttcatccctaatttcggaccatgtacgttcaatacttttccccaatatgtccattttcatgcgtccaagtcctttatccttaagtcttatatattgagatatttcatcaaatgacaaatctttagccaatgccatagaaaatgcttcatttgatgaatctgcctttggttgtgactttaaagtatctgttttatcatccaataactgtaaaatatgattataaactttattatctaaatctctttgaatgagacccggcttagtcttttgtttggacattgttctctgactatatctaatcaactgcaactctaaagatagacctttcactgatagaaaaaaaattcatgaaattgaaatatttttttttgtttcagaattttttcctcagctgaaaccacttgcgcggggttcgaaatggtgttagtggctacaagacagtttttaatacaatgattgcatgtataagaggtatatgagttatataaaatgataaatatcaacatgattaatgactttagctaaaatcagcaacttcgattctagtacattcacccttttgaacagccataacacatcttttataatcaaaagctacttgccaaactgcaccatcaatatcttcaaccatattacgtataaattcaccagttttagcattccataatttaagcattccttgactacctgagacaactctataatcatcattttcaacacaagttattgcagatgtatgacctctaagaacatgacgtggtacaccagtatcaggatcccaaattctaacagttgaatctgctgctgcacttacaagtacattaggtgatgatgatattaatccaactaatattgtatgaccttctaatatagctgtacattcacctgttgataaatcccatattcgtacagtattatctgctgaacctgtatatgccctatttctaacaacatcatagacacaactataaattctatcagtatgaccattaagtacatgtaaacattcacctgttgttaaatcccaaactctagcagttgcatcataactgccactaattaagatacgaccatgaccagcaacggctctaacagatgcaacatgacctttaagtacaaataataaattaggatttgtatttgcatctaattcaattggtgttgttgaatttgttgttaatggtaatttccaaacatacagtgttgtatctcttgaacctgttattaataatggttcagttgggaaaataattggacgtcccataacgtctgtacctatttgttgtggttcaataatttcaagacatctaacagttgatgtatgacctttgaaaacgtgtgtacatctaccagtatctaaattccaaatacgaactgttctatcagttgaacctgatgctaaaatatttttataaaatttcattgcccaaacaccacctgtatgaccttttaaagtatgacgtaaagaacctgttgatgtattatatataagtatttgatttgtgtttgagcctgcagcaattttatcttcatccagttgcagacatgtaacaacattaagtatttcgcctgtttgtaaagtataacgttttggattatatgaaggatccatccaacgttttaaaactctacgtcgaatatcataaactattcttgatgggaaatctttttcctttgataattcatcctctgttataagaccttcctttaataataaacgattccataattcagggtgtgttgttgccagttgattccatttacgacatacagcagaaactgatcgcagatcttcacttggtaaatgtgataatattttaactgaaagttctggtggtaaacttgataaaatatcttttcttagtaaatttcctaatgctgcatgaactgttgataacattaatctaggagttttctgcataagggcagcccatgtggtctctgatatatcaagaggtaaaggtggaggtgagggaagaggagaaatgggagactgtggatgagtattaggtctcttagttggattagagggtggtgtagatgggtgtttcattgtcctaggatgaatagaaactggttatatagatatacaatatatcgatgtagcaataatataataataacaatacgtattatggctattcgtcatctaaaaattgttgataaacccaccactgagtggaaaatctggaaatatttagcaaagttacgtaatacataatataattgcttaaagtggtagcaatttgcatgatattactatcatgttttcttcttcctcttgagggatggaactagaggagcattacatggctaattgatgtttctttattttctgaataataatagttaaaaaatttattattaaaattgtataatcttacatagcaaaaagacttaccagcttaacaccttgataatctcaaacactagcaatgaaaaatattcaactgattcaagcaacagtttttgcttcctttgtagctttaaccggagttttcaaaattttaccaggtttaacctttggtttcttattttctttaccacttgctttaactttttccttaatatttacttttttagcaactgaaatgggttttagtgcagatttaagtgcagatttaagtgctggttcagcagtaggcttagtaactggttggactagaggttttggttttggtaatattggctttggaatttcaatctggttgagcttttcaacataatcaactaaatgaagataattcactttctttggagggaacctagcattatcctcttctctttcttttctttctttttcagcctttttaaacaacatttttctttttttttctctgttatttgagtaagcccaaaattgtgggatatcatcataactgtaacaaccatctgtattggaactgtcaattatttcatggaaacgttctttggtttcaacgtcaactttggcaaaaggaacattatcaaataatttaccaaaattacccattaagcatggaaaaatattataaacaaattcagcttcaaaataactacctacaaaatcctttttaactctttcagtcatttcattcattgcagtttcaaacttgttttcaaaatactctttccaatcactaactgaatcatcaagatccttaagaacgaccctacgagtacgcttataattctcgtatcttttgttatcttctaagtataaataagcaaattgtaacatattgtataattctcttctttcggggtgtttatctggatcaaattcacagtgcttatcatgatagttacctatctctcgaatatcaataaattcgtgaacaagttcttcttcaaaccagtcttcttctgtttttaccattgtgtttagttacaaagagctatgccaaagaaagcaaagaagaagataagtgataaaaataaaatgataataataaggaggctcatcaataccatacataaaagataacgcgatttagtttactaattgaatcattttatcatacaaataatatacaacgaatctcttataaaagaactctctttttagatggtttgaagatggtaaaagaattgggtatatcttctaagctttgactgacttggtggtctttctggtaacttttggtttagtgacttttgatgtagtagtcttggcttttgtaactcttggtttggtaacttttgctgtagtaacttttgacttggtagtcttagctttggctgcaggttttgattttgcggcagcattagcttttgctgtagttttaacaactttctttacttgtggttttacctctagctttggttcaggttcttttttaattttattattcaatttctcaataaagtctaataaatgtttattacctacgattttagcttgcatttgttcaccttgtaacacttcgtgtactagtttttgctgttttgcagtctttgtggtcattaacttaattcttctagatctattgttcatatatttaaaccaatctaaaataagatcttcattaaatcctccatcaccccaacaaaaatcaacaatatcatacaaacgttcttcttcttcaatactaaaccttgaatatgggttaactgcgtaaagtttatctaaattgcctccaaggaatggcattatctcagcgatataacagccctcctcgtcagtttcagtatattcctttctatcctttgcaatcatttcatttatagcaaaaggaaatacgaagttaaaatactcctcccatgtattacaattttcatctagttctttcaatacaactttacctgttttcaaataattctcatatctccgatcatctgatagatatagacttgaaaaatttgccatcatataaagaggatagttgtttggatctctttctacacgtaatagtgtatctatatccctcaatttattacgactgtaaagaaaaaacttacttggttctgtttcagagtaatcacagtatttctggtcttccatgttttgtagttgtatgtataagaaaagaaataagaaaagaaagtatattaaattgtaatacaaaatcaacgttttaactgtcaaattgtccattgaaaaatttcaaattcaatgacgcgtagataagaaaagacgtgtctctattttgacaggatcgatattataatctttaggattgatattcattatatatacgggctatatacatcattagacaaagtttattttttagtcacgttaccttcagttacctaatagctattgataagttaaataatatatagcaaatcattaattaaagtaaaatatttagtttttcaaccgatatacttactttttagcaaagatgtttaccttttctgcgagtttaactggaacctttgatactttagaaactttagcttttggtttcatgttctcttttccatttaccttgactttttcttttacgtttatttttttagcaactgatataggctcaagtgcagctttaggtgtagtcttagctgaaggcttaacaactggtttaataactggtttaacaacttgctggactacaggctttggaatctcatactgattaagtttctcgacataatcaaccaaatgaagataatttggaggattcaaagcctctagttcttccttttgtttctttaaccttgcagctttagtaagcatcaacttgattcttctttgtctgttcttagaatatgtataatactgtggaatatcatcataactatattcgcaaccatcaacagaattatagaaacgattttcagtttcaagatcaagcttcgcatatggaatcatttcaaataacttcccaatatcacccatggcccaaggtaaactctcataaaccaagtcatcttccatactatagtcgccatctaaaaattccgctctaagtctatcatccattgttttcattgcaatttcaaacttggtttcgaaatattctttccaatctttaactgaatcatcaaggtccttaagtatgactctacgtgttttttcatactcttcccgtcttttatcatcttccaagtataaatacgcaaattgcatcatgttgtataattctcttttctcaggatgtctatccggatcatattcacaaagcttatcgtgatatttacctggtatgtaaataaattgagaaacagggtctttttcaaaaacgtcttccttttttaccatagttgttagtttaaaatgctatgcaataaaaagcaaagaagaatgcaagataattaataaagataaaatgataagaataaggagactcatcaacaccatataaaagtattcggatgcgagggcagtgaggttctcttttgactgaatttggtgagaaccatttctgttaataataccttcgttccttaaattggatgccataactttctttacgatatcagtaacgttacctttagtaccgtccgatttaagttcacctgagataaccatttgagatatcatctcagcggttttatctatattcttactggaatagttgacttgattgaatgacatctttgatgatagttaatagattacgtagatctttagttagcgttttaatatataaatattatatataagctcgagtgttcttctaagaagaacaagagtaactaagttatacattcgaaatatgtttcatatttcaagatagataaatttatttgtcgtcgataaaatcttcgacgaaatgtttatgattacttaatctcataaccatatatctcaacacaccacctcatcatatacatgtagtcgtatagatatttaacttttgcattgtattaaagtttaattccttgtggattttatgatataatcttttaactttttgtgttaaaatatttgcgaatttaaatttagattcaattttctttgaatttacttgattgataggatgttgaaatgtaatatcttgattttgattttgattttgattttgattccatgagttatatgttaataaattattgtaatttttcttcatggttttcttaatatttgaatggtgttcatgattatcatgaattgacttaattatagtgtttaattttgtgatttaaattcaattctaccatccttttccaatgaaattgaatgtttcgtacctgagtacaccaccataatgttatcatctttgtttgaggataatgttccttgatcatcaacattgtttagattacgattggcttcatattcatcaatttgattttctttatattgataattgtaataattttctggttcataaatttgatttccttggaatacattttgatgatcttcaacgaattgatttgttctcgattgattatttacagttaataaattaactggttgaatataaatatttgattgatgaactggttcgttatcgatatttaacttaaattgttgattattaacagttgttttaataactggttgatgataaacagttggtttgactgtttgataattggcagtttgtaggatatctggtaggtatttgacagtttgtttagtaactggtgaattgacagttgaagtaactgatttgttactgacagtattttcagtaatcgataaatgattggctctttaataattggttgattattgacagttgaattaactggtagatgactgacagttggtttaactgatatatgactgacagttggtttaaatggtagatgattgacatttgaaataactgttgtgtttttgacatttattgtattagctgataaactattgttaatttctttgataaatgattgatgattgacagcttgattgacagttgatttaactggtagattattgacagttgttttactaactggttgaataacgatatttgattcattaactggttgatgatagacagttgttttactaactggtggattattgacagtaattttgttaactggtagattattgacagttgatttattaactggtagtttatttaaagaataacctatattgaccattttaatttcataaccaggtactattgtatcctttgatgtttcatcttttgatatatcatcatataaatttatatctgaatttgagtgtttgctgtttgatttgtaattatcatttcttttgaattttgttgcataagatttcttattatagaatttctttgttttattatttaatgtaatatgtttatattgattatcagcgttttgttgtaatttattattcaaatttgaatgtttcggattatttggaattttaaccgttttatgatttgaattatcatgatttgaactatcatgtgttttgagttcttgctcagttcttgttaatgacttacttattgacttactggttttattgaattcttgctcagtcaattgatcaccatctaaatatttattatttttcataatgggtgtatacttttcattagttgaactaattgatttatcttcggtaatagatattttgaccatacattttgtacgtttaacttctttattgtttgttatttcatcaatatttccaacaagtttcatatcatttacctttaacttcacatttctagcaatttctatattgttatgtgttgctgtaatgggcatatcaccacctaaatgatgtgaattttgtgctttagtatttttaatcattttattatattttaatcttttgtatttagatttatcaacacttaaaatttgtggtctattatgtttatcaccacctaaaatattctttttgatatatttatcaccacctgaagtgtatgatcctttaggtctttcaccacctaagttgtaatttttctgatttttatcaccacctaacatggatgatcttccaggtatttcaccacctggggtatagtttttcttatctacacaaatgttatgtgtattatcaggtttatcaccacctgttttattatttttcttgactccacttactttaggtgtactttcaggcttttcaccacctgagttataatttttattgattccacctactttaggtgtactgacaggcatttcaccacctgtttgattcttcttgtaatatttattttctgaattggtcttactcgattctttgatgccataattattatttgttttggacttactcattcctttgatgccataaatatgcttagctttagttttgtatttgaatttaggattgacaatactttgttgactataatttttattaatatatgtgctggattttgcgattgctcgcagcatatttgttggtgtaaattgatttggatagattgtcttccattacttcatttttataataccatagattaccatctttgataaatttgattcctttcttgatattttgattatttccgatacatattagttgttcttttggaaatgaacggattgttaaaccttgttcatcaatttgtgcgacactgaatagattaatatcgatgagtggggtgaacaacgcatcaatagtgtaaattttattttctatttctaattcaaatgttccttgtccaaaaatgtggataggagtctcatttgcagcttctaatagttcaggttcttcaaacttttccaatgtggtaaataagtttgtgttgcagaaagcagaggtttctgcaccagtatcaagcataactttgtttcttaatttttcatttttatttagttcaacgttatttaaactcttgactaagtttgggaatctaattgcaccaacaaatctaccttttctagtaggtttaccaggaatttcctttttactctttaaatctgattcttcatcatcagatgtttcatccgattcatttgtatcggatttttgttcattatcggatgtgctttcatcatcatccgtatcatttaataatgcttttaatttttggcaatcagacgttttatgtgtattgtcattgcaatatttgcaaaatttagtatttttcactttagactttttagtcttatcttcacatttatcttgtttatttgtaacagaattgatctgtttctttgcattatttctttcgcttgctttctcatcgttgatcaattgatcaattgaactgtgcaagtaacataaattgtgattctcttcagaaaatgttctccacattgcaacaaaatattgtggaaacttacctgatgtaataataatttcacaggctacttcatcatcgaatttagaatgtgtaatctccataccaataaggattgattcgatggctttcttgattctcatcatatcataatcttgagtaaaaatttcgtttaatctcatatgcatcattgcattactaactggaatatttaacttttctaaaatacgtgccacaacatggacactatttctactcatttttgttttgttatttatatgtttgagaatgtcatttgacacggttctttgcattactcccataatggtactatcaaatgttttacaaccgtgatattcgttcacatgagtgaatcttctttcgtataaaacgaaagcttgacatacgatttcggtaaatttaacaccgcctaagatcctgttgatctctctaatccaattaccaaattcagctggttggtttaatgtagtaatgaacggtattgcatcgtttatgtccttggctgttctacacatgcaaggtgcatctttgtgtataaaacaaccgtttccgatttgaacaatttcatatttgctcaaatcaattccacgagtagcttcttcttctgtaatcttgtgagaagccaattggatcagctcctcactctggtcgccatattcggatgcgagggcagtgaggttctcttttgactgaatttggtgagaaccatttctgttaataataccttcgttccttaaattggatgccataactttctttacgatatcagtaacgttacctttagtaccgtccgatttaagttcacctgagataaccatttgagatatcatctcagcggttttatctatattcttactggaatagttgacttgattgaatgacatctttgatgatagttaatagattacgtagatctttagttagcgttttaatatataaatattatatataagctcgagtgttcttctaagaagaacaagagtaactaagttatacattcgaaatatgtttcatatttcaagatagataaatttatttgtcgtcgataaaatcttcgacgaaatgtttatgattacttaatctcataaccatatatctcaacacaccacctcatcatatacatgtagtcgtatagatatttaacttttgcattgtattaaagtttaattccttgtggattttatgatataatcttttaactttttgtgttaaaatatttgcgaatttaaatttagattcaattttctttgaatttacttgattgataggatgttgaaatgtaatatcttgattttgattttgattttgattttgattccatgagttatatgttaataaattattgtaatttttcttcatggttttcttaatatttgaatggtgttcatgattatcatgaattgacttaattatagtgtttaattttgtgatttaaattcaattctaccatccttttccaatgaaattgaatgtttcgtacctgagtacaccaccataatgttatcatctttgtttgaggataatgttccttgatcatcaacattgtttagattacgattggcttcatattcatcaatttgattttctttatattgataattgtaataattttctggttcataaatttgatttccttggaatacattttgatgatcttcaacgaattgatttgttctcgattgattatttacagttaataaattaactggttgaatataaatatttgattgatgaactggttcgttatcgatatttaacttaaattgttgattattaacagttgttttaataactggttgatgataaacagttggtttgactgtttgataattggcagtttgtaggatatctggtaggtatttgacagtttgtttagtaactggtgaattgacagttgaagtaactgatttgttactgacagtattttcagtaatcgataaatgattggctctttaataattggttgattattgacagttgaattaactggtagatgactgacagttggtttaactgatatatgactgacagttggtttaaatggtagatgattgacatttgaaataactgttgtgtttttgacatttattgtattagctgataaactattgttaatttctttgataaatgattgatgattgacagcttgattgacagttgatttaactggtagattattgacagttgttttactaactggttgaataacgatatttgattcattaactggttgatgatagacagttgttttactaactggtggattattgacagtaattttgttaactggtagattattgacagttgatttattaactggtagtttatttaaagaataacctatattgaccattttaatttcataaccaggtactattgtatcctttgatgtttcatcttttgatatatcatcatataaatttatatctgaatttgagtgtttgctgtttgatttgtaattatcatttcttttgaattttgttgcataagatttcttattatagaatttctttgttttattatttaatgtaatatgtttatattgattatcagcgttttgttgtaatttattattcaaatttgaatgtttcggattatttggaattttaaccgttttatgatttgaattatcatgatttgaactatcatgtgttttgagttcttgctcagttcttgttaatgacttacttattgacttactggttttattgaattcttgctcagtcaattgatcaccatctaaatatttattatttttcataatgggtgtatacttttcattagttgaactaattgatttatcttcggtaatagatattttgaccatacattttgtacgtttaacttctttattgtttgttatttcatcaatatttccaacaagtttcatatcatttacctttaacttcacatttctagcaatttctatattgttatgtgttgctgtaatgggcatatcaccacctaaatgatgtgaattttgtgctttagtatttttaatcattttattatattttaatcttttgtatttagatttatcaacacttaaaatttgtggtctattatgtttatcaccacctaaaatattctttttgatatatttatcaccacctgaagtgtatgatcctttaggtctttcaccacctaagttgtaatttttctgatttttatcaccacctaacatggatgatcttccaggtatttcaccacctggggtatagtttttcttatctacacaaatgttatgtgtattatcaggtttatcaccacctgttttattatttttcttgactccacttactttaggtgtactttcaggcttttcaccacctgagttataatttttattgattccacctactttaggtgtactgacaggcatttcaccacctgtttgattcttcttgtaatatttattttctgaattggtcttactcgattctttgatgccataattattatttgttttggacttactcattcctttgatgccataaatatgcttagctttagttttgtatttgaatttaggattgacaatactttgttgactataatttttattaatatatgtgctggattttgcgattgctcgcagcatatttgttggtgtaaattgatttggatagattgtcttccattacttcatttttataataccatagattaccatctttgataaatttgattcctttcttgatattttgattatttccgatacatattagttgttcttttggaaatgaacggattgttaaaccttgttcatcaatttgtgcgacactgaatagattaatatcgatgagtggggtgaacaacgcatcaatagtgtaaattttattttctatttctaattcaaatgttccttgtccaaaaatgtggataggagtctcatttgcagcttctaatagttcaggttcttcaaacttttccaatgtggtaaataagtttgtgttgcagaaagcagaggtttctgcaccagtatcaagcataactttgtttcttaatttttcatttttatttagttcaacgttatttaaactcttgactaagtttgggaatctaattgcaccaacaaatctaccttttctagtaggtttaccaggaatttcctttttactctttaaatctgattcttcatcatcagatgtttcatccgattcatttgtatcggatttttgttcattatcggatgtgctttcatcatcatccgtatcatttaataatgcttttaatttttggcaatcagacgttttatgtgtattgtcattgcaatatttgcaaaatttagtatttttcactttagactttttagtcttatcttcacatttatcttgtttatttgtaacagaattgatctgtttctttgcattatttctttcgcttgctttctcatcgttgatcaattgatcaattgaactgtgcaagtaacataaattgtgattctcttcagaaaatgttctccacattgcaacaaaatattgtggaaacttacctgatgtaataataatttcacaggctacttcatcatcgaatttagaatgtgtaatctccataccaataaggattgattcgatggctttcttgattctcatcatatcataatcttgagtaaaaatttcgtttaatctcatatgcatcattgcattactaactggaatatttaacttttctaaaatacgtgccacaacatggacactatttctactcatttttgttttgttatttatatgtttgagaatgtcatttgacacggttctttgcattactcccataatggtactatcaaatgttttacaaccgtgatattcgttcacatgagtgaatcttctttcgtataaaacgaaagcttgacatacgatttcggtaaatttaacaccgcctaagatcctgttgatctctctaatccaattaccaaattcagctggttggtttaatgtagtaatgaacggtattgcatcgtttatgtccttggctgttctacacatgcaaggtgcatctttgtgtataaaacaaccgtttccgatttgaacaatttcatatttgctcaaatcaattccacgagtagcttcttcttctgtaatcttgtgagaagccaattggatcagctcctcactctggtcgccatattcggatgcgagggcagtgaggttctcttttgactgaatttggtgagaaccatttctgttaataataccttcgttccttaaattggatgccataactttctttacgatatcagtaacgttacctttagtaccgtccgatttaagttcacctgagataaccatttgagatatcatctcagcggttttatctatattcttactggaatagttgacttgattgaatgacatctttgatgatagttaatagattacgtagatctttagttagcgttttaatatataaatattatatataagctcgagtgttcttctaagaagaacaagagtaactaagttatacattcgaaatatgtttcatatttcaagatagataaatttatttgtcgtcgataaaatcttcgacgaaatgtttatgattacttaatctcataaccatatatctcaacaaaaagataacgcgactaaactaacttaatcttctattcaaaagtttatactacataatgttatcgataatatacataggattaacaatcggtttatagccaggagagaacttctaaataattgacttgtttggtgttatttgtttgggtaacttttggtttagtgacttttgctgcaggtttagctttggtagttttagctttagcttcggttgtgacaaccttaattacttgtgggtttggttcgggttcttttttaatttcattattcaatttctcaataaagtctaataagtgtttattacctgcaagtttagcttgcatttcttcaccttgtataattgcttgtgctttttttttgctgttttgcagtctttatggtcataaaatcaactatatcttctctattgtgcatatatttaaaccaatctggaacgtctcggtctctacatcctccatcatcccaacaatttttgaaaatcttatataaacgttcttcctcttcaatactgaaccttgaatacggattcattgcataaaatttggttaaatttccatctatgtatgtcattacatcaaagacatatattgcttcatcttctgaatcgtgatgtttcttcctatctttttcacgaatttcttcaactgctgggtagaatttagtttcgaaatattcttcccatgtaccaacagtatcatctaactccttcaaaacaactttacctgtttttttatagttttcaaatcttttatcatcagataaatacaaacttgaaaagtttgccatatcaaagagatgcttcttttctggaaatgattctggacgtaatagtgtatctatatctctccagttattacgactgtaaagaaaaaactcacttggttctgtttcattgtactccaggtatttattttcgttcatttttaattgtctgtagaggatgtagacagtaaaattaaagaaagaagataaaagaatataaaaataaacaaaacaaagtttcgtgtcactctttgacagtttttaaagagtacgcgtaaatgtttctattgcttatatatcgatgaggttatattatataccggatgctatatagaaaaggaatctctaatgtaactggtttatggttgaattatagttgatagacaacttgggtttatatattaagccttaattggtttggtagtctttttggtaatttttggtttagtaacttttattgtagtagtcttagctttagttactttcggtttagtaacttttgcttcagtagtcttagtttttgttacttttggtttagtttttgttacttttggtttagtaacttttgctgtagtagttttagtttttgttacttttggtttagtaacttttgctgtagtagtcttagctttagatgcaggttttgcttttgcaacagtcttagctttggatgcaggtttagcttttgcaacagtcttaacaactttctttacttgtggctttgattttggtttctctttaacttcattattcaatttctcaatgaattttagtaaatgtttatttcctgtaagtttagcttgcatttcttcaccttgtataatttcttgtgctaatttttgttgttttgcagtctttgtggtcattaacttgattcttctttctctattgttcatatatttataccaatctggaacatctcggtctctaactcctccattaccccaactatcataaaaactatcatataaccgttcttcttcttcaatactgaaccttgaatacggattcattgcataaaatttgtctaaatttccagaaatccatggaattgtctcctcggtatatattgcttcctcttctgaatctttgtattcttttttatccttttcacgcatttcatcaacaattgggtagaatttagtttgaaagtattcttcccatgtaccaacagtatcatctagttcccttaaaacaaccttgcctgttttttggtaattttcatgtctattatcatcagataaatataaacttgaaaaatttgccatatcaaacagatgctttttttctggaaatatttctggacgtaatagtgtatctatatctctccagttgttacgactgtagagaaaaaacttactaggttctgtttcattgtattcgaggtattttttgtccataattggtttgctgtataagaaataaagggtaaaattgaaaaaagaagataaaagaatgtagaatagatagataaaacaagaatttcgtgtcactttttaacggtttttaattttacgcgtaaatgttcctaatagcttatagaagttatataatactggattctatatagaaaaggactcttttataaatagttcatggattgtttatgggggttagatcacttgaatatttcttctaagctttgactaatttgatagtctttttggtaacttttggtttagtaacttttgatgtagtagttttagctttggtaattttagcttttgctgcaggcttaccttttgctttagtagtcttggctttggtggttttagctttggtggttttagctttggtggttttaactttggcagttttggcctttgttgcagttttgacaactttctttacttgtggttttatttctagctttggttcgggtttttttctaatttcattattcaatttttcaataaagtctaataaatgtttattacctgcgagtttagcttgcatttcttcaccttgtataacttcttgtgctaatttttgttgttttgcagtctttgtggtcattaacttaattcttctttctctattgttcatatacttagcccaatctggaacttcccggttattacatcctccatccatccaacaagtttcgaaatacggatataaacgtttttcttcttcaatactgaaccttgaataaggattcattgcataaaatttgtttaaattaccaaaaatccatatcatttcatcattgacatgtagtgcttcatcttctgaatctttatattccttttcatccttttcacgaatttcatcgacggttgggtagaatttagtttgaaaatattcttcccatgtaccaacagtgtcatctaattccttcaaaacaactttacctgtttttttgtaattttcatgtctattatcatcagataaatacaaacttgaaaagtttgccatatcaaagagatgcttcttttctggaaatgattctggacgtaatagtgtatctatatctctccagttattacgactgtaaagaaaaaactcacttggttctgtttcattgtactccaggtatttattttcgttcatttttaattgtctgtagaggatgtagacagtaaaattaaagaaagaagataaaagaatataaaaataaacaaaacaaagtttcgtgtcactctttgacagtttttaaagagtacgcgtaaatgtttctattgcttatatatcgatgaggttatattatataccggatgctatatagaaaaggaatctctaatgtaactggtttatggttgaattatagttgatagacaacttgggtttatatattaagccttaattggtttggtagtctttttggtaatttttggtttagtaacttttattgtagtagtcttagctttagttactttcggtttagtaacttttgcttcagtagtcttagttttagtaactttagcttttgctgcaggtttaactttggtggtcttaacttttgctgctgttttgataactttaaccacttgtggctttggttcaggtttttttctaatttcattattcaacctttcaacaaaatttattaaaaatttacaacctccaattttggattccatttccagaaatgtttgtttcaaagattctttctgttgttgtgtctttttagtcattaactcaatattttcatttctattatccgtataatcaaaccaatctggaatctgatcttcatcaaaacccatttcagcccaacaaatctcaacaatatcatataaacgactttcttctttaatactgaaccttgaatatggattaactgcataaagtttatttaagtcaccctcaaaatatggcaatatctcttcgataaaagaattctcttcatctgattcgatatattgttttctatcctttgcacgcattttgttaatctctgaaacacatccatgttgttttgaattaaaatattcctcccatgtattgaaagagtgagttagttcattcagtacaactttacctgttttcaaataattctcatatcttttatcatcagacagatacaaacatgaaaaatttgccatcatataaagaggaaagtttcttggatctctttctacacgtaatagtgtatctatatccctcaatttattacgactgtaaagaaaaaacttactaggttctgtttcagagtattcacagtatttttcgtattccattgttcgtagttgtgtatatatgaaataaaatggaataagaaagtatactaaattgtaatacaaaatcaacgttttaactgtcacaatttccagtgaaaaatttcaaatttaatgacgcgttgataagcaaagacgtgtctctattttacaattaaggagtattttaatatgattggtattgattatacatgatctttatatattattgaacaaagttcctcttatagattatttcttctttttggtaactttacccttagttaccttttcactactatatttatccattatagcttgcattgtactattttgacgatttctattttcactgattttccttgcaagttcttcaaaactatcgcatccttcatcctttacatatttatcagctgcctttttctcccttaatgctttacgttccatctttttcaccctttgtttcctctcagaggtatatttagaaaattgtggtatatcttcgtcctttagttcacccttttcaatgagtttttcgattattccatacactctctcctcttcttccttactgaattctaaatgaggaattctttcaaataatttctctacattacccttaacatcgatcatttcatctctaatatcatcaagttcttcctcgctgttttgatattgtttcttatcttcaacaatcatatctttagtaacttccttaaattgtgtttggaaatactctctccaatcaaaattttcatcattttcaacttccttaacacttactacacctgtcttatcatatctttcacgtttcctttcatcagataaaactaaataagctaattgtattttatcaaactcttctcttttacctggtgctttatcagggtgatatttcaaacattttttacgatatgcaacaactatatctctcttatttgaatctgataatacacctagtatctcatatgggtttatgttctccattggttgtgttatgaaaagaagtaataaccattaagagtgaaatttgcattttgctggggtgaaatttcatgtaacgcgtctttaatatgacagctcttatgtcagggtattgtgatttaatgatcctatttacttacatggattatagagattatgtgttcattttataactcaattgagtaatttatgagctatttgtagttaatactgtaaaaagagactaaaataagtaaaaaaggtattttaattatttctgtttacaaagtaaatttaaaaaagtcaaactaagctgtacctttatcataaaaattttacgtttttctaaattataactatttttgaccttttttacattaccagcatatggcaacagcatataagatagtcaatatcaaatatcaagagttatagagcaattttgaacatactagtaacaatcaaactttttaacattccaatacccacgacacaatatttgtcatagtcgattatacagtgtatttaacaaatacttcacttaactttattccattataacaaaaacctttagtcaattactctacaatctattaattctatatatcaatttaactatttataaatatacaatctaaaactatctagattcttttaactggaccacccggtgaagtagcctttctagcagttaaaacttcaacaccatcttcagtaacaagtaatgtatgttcaaattgtgcacttggtttaccatcagcagttgttgaagtccatccatcaggccacataacatctctataagaacctaaatttaacattggttcaatggtaaaacaaatacctggagtacatacaccaattgctttatttttagcataatgaggaatttcaggttgacaatgaaataattgattaacaccatgaccacaataagttctaacaactgaaacattattatcatctgcaattttttgaattatattaccaaattcacgaactggtaatcctggtttaacagcttcaatacatttatctaatgattctctagttgtttcaactaatctaactaaatcaggattactctttgccttatcaccaacataataagtttcatttaaatcagcatgaaatccatctttataaaatgaaacatcaatattaacaatatcaccatcaactaattttctcttatctggaataccatgacaaataacttcattaactgatgtacaaacagattttggataattaaaataatttaatggtgatggatatccacctctttcaatacttgcattatgaacaattacatcaatttcatcagttgtaataccaggtttaacagcttcacctgctaaatctaaaatttctctacctagtttacaaacttctctcattttttcaatttcatcaggttttaaaacacgaattttatttgttctatcattctttaattcacttactggttcgccattaaatgcataatctggtttggcaattgaatctggaactggtcttcttggtgaaagtgggaaagctggtttaatagtacctctatatgcaaattctggatatggatcataactttcaacaccttcctttggatgaattgccttatgttgagcaaatgatccacggaaacatattgaattacagaaataattttgcattccggctttaagacaaattggacattttaaattagatgtagttttcttaccacaatttggtgctgcacatgttttaacagttgacatagttactcaagcaatgtatctgtttattgaattatagtcaaaaagaagcttaatctaacaataagaaaaataaagaaaagaccttcccatagtaaaaatagatgaaactgaaaatgatcgtgaaaaattttattttcaaaccctcttcatttttgatatcatgaatgttgaatgttatatcgattttattaacttctgttaggacatagtaacacatatctatctacatacactatatactatgactacaagagggtttgtaaagctagagattgcacttccagaagctgctaatttaccatcatcaacacattgttgttacgttaaaccacatacatcaaaactaccgaaccaacaacaagataatacatgttcattatttgttgtaaatccattacctcaaccaatgtggacactagcatcagtaaggacgattttccgtcaaattagttctgcaagtcatatatcaaatgttttattacatgattgtattgatgaatcacgtgtatcttcaataggtagtggagttaattatgatttacatattaatttaagtattttaagtaatccagatttaggatcaccattaagtgaagaagaaatgttaccatttggtacgagtgttgtaacatttgttgatagagatggattagaattatttttaactaatttaacaaatattaataataataaaagtaagaaaaaagataagataataacatggaagggagatgaaaatgtttcacttggatttgaaagatattctaaggtacagaatttagttaatagagatgaaatggagaaaattgttgcaaaatcacttttagaattccaaaatcgtgaaaaggaagcagaggatgatgttaataatttgaagaatattgttgatgaagatggatttacattagttgttggaccacaacgtaagactaaatctgaaatcttaggttcattaagaaaaaagaaattagaaaaagatgttataactacaaatgataagaaagaaaaggaagatttctatagattccaaataagagaacgtaagaaacaagaaatgggtagtttattagctaaattcagggaagatcaagaaagagttaaattgatgagacaaagacgtaaattcagaccatattaaattagtttttgtattgtatattgtataatatatttacttaatttataatctcccaccaggagtttcataatcatcaaatttatgtgaatcaccagtatcatcagtttcttcaacttgtctaagcataagtgaaggtgataatcctaattcatttaattctttgaaaacaacaacaggtttttcatcatatcttaaaactctttccttatcacctccataacaaataactaaaacataatttctccattcactacgatctaatctatgactacgcattgcagcttgtaatattttataacatggatcttcagttttagcacgtaattgtcttaatgtatcattaccaggatcatcatttgaattattttcaatttgttcatgagttgaacgtcgtgatgacgaacgtctattttcagttggtgtttgaatagattgactgtgattaatatttgaacttggtggtggtataattttatcactagttgatgatcttttccttaaaaattcagctcttaatggtgattgtacaggtgtagttgattttgattttggggtattattattaggttcaatcgttttattatctacaggttttggtaaaggttttgtgtcttgaatatcttttaaaactggtaatatctcttcacgtagtttatttattttagaaactaatgaatgataatctttatttctatccctttcatcatttttaactttatttattaacttaattgaagtctcatcaactatacctttagaaattgatttaattaatgaagttgcaattatagttgtctgtaattcagataatattggatgtttactatcataaatacctaatgataaatctttttcaacaattaattcacttatattatttaaaatttctaatcttaatcttaaattttcaatacccatttcctttaattcttcactatttaacattggtaatgtaataccagttatgttatgaattctaaatgattcaagtacattatctggatatttattgtttttcaaccataataacacttgatcgttcttccacgtaaacattgcttactgaagtatatatcgttgatggttcatttaatcaacacttgtgcatgatataataaatctactgtactaaaaatagatctttagatgataaaatatacgactcgtcgtctataaaatatcacaccttcctaattgggtaatctcatcgcgtttattgacattttgccgtattgggtaatctaattgaatttattaaaatttaaacaaagcaaattacttatttttatagttttgctattattttttttgtgcccaatgtatttattggatgataatatagatgaataaaaagattgtttgctttaaagtataagaagttagtttaattagagtcttatcattattatttatcattcaatagttttagtttctataagtcaaatcattgatcatgcttaccgatatatctaatagtgtgaataacacgaacataaatacaaatttaattacacatgtgtcaaatggaagtttaaagccattaaagatagtaagtcgtactaatcatcaattatataacgatgagaatagaaatccaatattagttaagttaaataatgttagaaagcaaagtaaatttaataataaatccaatatcagtaaaatcaatactgataataatttaaaaatgttagagataccaaattatagatttaataaaattattaataatgaaaatgatgttattttcccattttatgaatgtccattaaaaactgataatatttataaaaataatgaactaaaattagattttactggtgacattacatttttcaaaaatgtcactaagaaatattgtaatccgattaaattcaagtatattaagcaagagaatgttataaatatgaatgatgatccaatgaaagatttttttatgcatggtaaggatgataataaaattaagtttggagataatgttgttttaataaatggtaatggtacacattcaatgattcgtgatgttgaatttcaaagtgagtttggattcaaagagagtgatgaaattgagtataatgaaaacgatgaaattttatatgcaagtgatgaagatgaggttagtagattagagaattctgatttagatgaatcaatagataaagatgagagtgaaagtgatgaagatattaatagtaataatagtaatttaacatttgatcttgatttagtaatggatatggatatggatatggatatggataataatagttataaggaagaagaagatgatgatgaagatgatgatgaagatgataatgaattaatttcacaaaatatttcatcatcatttatacttgataatttaaatgaatttaataaagctactatgatatcaccaactaagagaacagttatattaagttccaataagaatcatggtaagagcaataatataatgagtagagttaatgatgatagtccaaagaaacaagaaacaattttacgtaaattaaagaataatagttcaccaattaagaatcttaaaactcatagatcaggtaatataattaattctattaagaagccaaatcgtacaaattatagtaaatgggatagttcaatgactattagtgccagggcaattatgaaaatggttgatgatagtcttgtttcaagtgatactgaagtttacaatcattcatatagttatttagcaattaagaattctaataataataatattaataataagggtaaatcattattagataatataagtattaatgcagcagatttgatgtgtgcattaaatgatgaggaaggagacgttgatttagataataatgaattagttaaccaaattcaaggacttgaaatcaaataaagtgatgtttgtatacataaataaaaaataaaaataaaaaaatgattccctatattttcagttctctaattgtatattgtatttttctttgataattaataataaaaaaacatattttctaacagtattatattatatgatgctataaaatgatgtatttatataatataaagtaaagtacagactataatcaagaagtgatagattcaaaacctattatattatatagattttggtataacaacaaaacctggatcagatttacgttcagcacgcatatctgccttatccttataaacagatgataattccaccttaactaactccttaactcttgcaatttgacctgcttgttgaggagtaattttatggtagacagtttgatgtcttctacgtaatcccaaagcatgtaaagtttccttgtacaagcttggaagaccaatagtggatctgagttgtgtgaccttgaagtacttagcaggagcagacattgtcagtggtaactaaccaaaagatgtaactccctactccagtgaaaaattgttcaactgttaaaattcatgttgagagaggaaagagagcggaaagtcttaaacagtggttacgtaaggtattatgacgttttccaaattttcaaatttatttttatttttattttttcatttggtgatggcaatattattaatatttactgatttcacagactggctttcagtaaacaagtgggtgaagtggtttatatacattggatatactatactctctgcaatttatctctttctccttttatttactctatcactgtcattctctccttaagttacagtctttggctggtttgattgtttaattagacggtttaaccccccttcctctttctcctatttaaagagccatgctggatcttttcaaaaatataatatcaaggaaaatcagagataaagaaggttctgaattgatatcttccgattcatcatctatcaatgaaactaataatgaaatcacttcaattagtaactcaacttcaagtggtgaacaaaataaatcttcaattaaagtactattagaaattcatccggaacttgcggaatattactctgaattacatgaaagatatttactctctgataaaattggtgatggtgcattctcagtcgtctataaagcttatgattcaaaggagaatagatatttagcaattaaaattattaataaattatcaatgaaacctgatcaaattgcttcaattttaaaggaaattgcaattatgagacaacttaatcatccaaatattgttaaattatataattatcaaaattccaatgattctaaatattgtttcctattcctggaatatatcgcaggtggagaaatatttaatcaaatcattaaatatacttattttagtgaaaatttatcaagacatatcttaagacaagtggcattctctgttaaatatttacatgataatggaattgttcatcgtgatattaaacctgaaaatttattatttgaaccttcaactttaattccaagatcaaatgatgaacaattattagctcgtagaaaatcagatgatgataataaagttgatgaaggtaaatttacaattaataatggatctggtggtataggtattgttaaattagcagatttcggattatcaactcaattacaaaattcattagctagaaccccatgtggtacagttggttatacatctcctgaacaacatatgaatgttggttatgataaaaaagttgatatgtgggcattaggttgtgtcttatatacaatggttgtaggttttccaccattttattcaaatactcaagatactaatgatattaatgaaaaagttattaatggtaaatatcaatttcttaaaccttggtttgatgaagtttcaaatgaatgtaaatgtttaatttcaaatttattaacagttgatcctcaaaaaagatattcaattgaacaattattatctgatcattggttaaatattggttatgaagatgataatacaattcaaaaaatgatgaaatcttcaaatcctgctgatgatataccaaagacaacttttgatgatggtttatttaaaacttttagtgaagatttaattaatactgataatgttggagattatttttcaggtcataacataacttgtgatgatggtactttattaactccaagagctgaagctatcaaactggtttttgatacggcaggttcaatgatgatatcaccaaatgataataataataataataataataataataataataatagagttatagatattgttaaacttgaaaaaccaactaaagttttatcgagtactgatagtataagtgatttagattcagatgcttcaattgaatttaatgctccagaaaatatcgttacaggtaattcagaagatgatgacgacgatgatgatgatgatgaggaagaggaggaggacgatgatgacgacgacttatcgttagattctgaggatgatactgatgattatccaataacattaacaacattatctaaaaccaaaagtccaatgattcgtcggcatttggtcgaatcatcaacttcatcatgtttatcaccggttcatagtcatgcaacaactgctactttaacaactcaaagtacacaaaaatcaccatcattaaaatcattcaaatcaactaaatccatcaaatcatttaaatcaattgatgaaaaacctacaaagaaaattgcatttattgttagtgataatgatagtaaaagaagtggtagtatatcatcagatttatcaaatttaagtttgagtagtggtatgagtactaattctggtattatcagatatgattattcaaacgctgttcatgattataattatgataataacgacaacaataatactacaataaatgattatgataatcatggtgataaaactccaattgttagtgaaagttcaattaaacataaagaatttagatcacgttgtcaaacacataccccatacgttttcaagggagaaaatgaagatgttgaaattgatttaaataaattagcaaatttaaatttgaatccatctgaatcacttgaagataaattacaacaacatagtgttgttcaattacaattaaattctgcaacaattttaagtcgtcgtaataaacaacgtggaaatgaagttgcttagagtttaatatattatttttattattacatttccattcttacattttctattcttacacttccatttattacattccctgtcattttcttctcttctcttttctgtcttttacttttacttttaggtttcttttctttcttctcttttcacccattgtcattcctttcttacttttttgtctattatagacatctctcatacttagcatacacatgatacatacacacattataaatttatataattttttttatagcatagcatttgtattttttaaaccttcctgcatggattatataaaacataatcatctatattaactgaattattattaacaagtttagcattttccttatcatttgaattatatctttctaatccttgttccaatgaagaaaccagtctacattttaaatgacgattagcaactctaaatgacattttctcatcatcaccaccattaacccgtataactaaacattgcggtgatgtatcactatcttcttgattattttcgaaaaacttaacattttcgggtatttgattccatggatctttatcaagcattaaataaagaccttctaatataacaattttagtatttgaattaattaaaacaccgggattaattggatcaccaactgaatgatcaaattgtggtactgataaaattttccaatttttcttaaacagtaattcaactaatttaactacattatcaccatcaaatgattcagggcatccacgtcttgatattaaattctgtggtaataattttaatggtaaatgaaatccatccattggtacatgtacggcattgagaaatttgtgtggggtattaagttgtttattagacttgtatattccaattgatgtctttgaaccacctttaccagtaatatatccatcaggtattatcccagacggtatttccaaagtaatattagcattttcatcatcataatcattatcattattaagcatattcaccagtcgttcggcggatgtagttttaccactaccaggcggtccatataataatactattattctttcatttgattccaatgcccttcgttttagaatatttgccaattcatcaactgagatgtccatgttttattttttgagcaattgagtaaagtatagaggtattaaaacaagaaaaccacacttaaacatcgataaggagcattcatgatacgagaaattgtcatgagatcaaattcaaaacttttcaattgcttatatctccctcattgccgcacgaccttgttctttacgcaacactggcctccgaagagtatagtgtatagtagaggtgataacagagagtatataatggattctattattatatatacataagtatgtggttagattataaagtaaattaaagtagctaactaattaatagatcaaacacgagagactttccacaatcttacacgaccaacatcattagcagttgcaagataaccacctgaaggtgcccaagcaagagttgatacacgacccaatggagttctagcagttggccaattaggaacaactttcccacttttaactctaatcaatcgaagtgcatctcttgttgtacgacttgcaacacataaaatactattatcaggtgaaaattcaatacttgaaattgaagttgttaaaactccaattgcacgaatcaattcctttgttaatttattataaatatgaacataacctgaattacaaccaactgcaatatatttactatcatttgaaacccttatcgttgttaatccaactattgaaccatcagtccatttatttattaatttaccaccaccatttgcacctgcagtaaattcccatatttcaccattacttgtaccaataattaatatattattatttaagaaacaaagatctgaaactataccttcagctttaactgcatgaatccatctaccagtttcaatatccattaaatgaacccaaccacttgaaccaacaactgctaataattcaccatttgatgaaacaacaaatttttcaaatgatttttgtctattttcaccagaataaagtcttgtaattttttcaactgcaccaccttcaactgaccatttcatcatatattttctacgaccacctgataaaacaaatgttttaccattattattttgaacaaatgatgcactattaacaggtgactgtcgcatatgtaatgatgtaatcatttcattttgacgtccatcaatatgaaatacacgtaatgtacgatctaatccaccaactaataataatggttgtgttggatggaaacttaatgcatgaactggtccatgtgatacacgtttaatatttgcatcaattaatctttcaactgatatttcaccatttccaccttcctctggtgcataacttctattttttgataaaaattctttcaatggattagatgaattagtgacaattgaatgtgatgcactaccaattttatcaaataaattggtataattaccttcattattttcatcatcagaatttaattcaatatcttcttcatatttatgtgcagcccattctggtgctgggaatatggaattgtattgtttttgtaatctaccaatatattcattacctgcaataaatctttcctcttcttgttgacgtaatttacgtgttcgatcaactgatgaaatatcaatatttaatctctcatcatctgaatcttcccatgcatcctcatcagattcatcatcatcattatcatctgaatcatctgaatcaacatccattttattttcatcatcaacttcttcaccttcagaatcattgaaaaataattgatcatcatctaattgaccaatttcactttcattatctgaatcatccttttcactatcaaatccatattcctggttacccatagaatctaagaattcatccctatctgaatcagattgaaattctaaaccttcatcatcactttcttcatcatcactatttaaatgttcaacatttcttaaatttgatgcaaacccttcaacatcaccgaaaaccaattttgctaaatacttttcttcagcatcgggcaatttaacctcaacctgtttattattaatagtgacagtctccattactcctagttctaacactattattcagcaaaagacacttttagatggtgtaagaagtgaaaaatctgaaaaaaattaaaatttttttttccactatgaaattcccaatgtggcagtgaggaaaatcagctttttcaattttactgcatgattattatcgtttgaatactggtagtttatggtattaaaggagagtttcctacacttgctttcacaacgaaatggctaattactacgatcctcacacataccgtatgtcacctgcactattgcgtgcacgtcaaccctattttgttagaaatatgattggtttggccgtacttattgcagttcctgtctcaatttacacatatacttacagattccttaatcaagatgatttcgatgatatccctattccaccccttgatgatgctactattaagaaattacaagcggaatatgaacacgaaaagggtgaaaactagttatgttggttatatttattattatataatagtcttgtcttgtctatagtgtatttatttttatgtttatcaaagaaagaaacaattaattaaattaaaggttataattacttctatattgttaatactccataactttattggcaatatcataaaatatctttttcaaaactaatctacttctctcaacatattccgtattcaataatggtgtgattttaaccctattatcaggtgcaaattcatataattcatcaaagaattcaacaagttgttcatcttgaataacttttaatccatccttcatattatcatattgtaaatcacaccattgttgttgaactgtcagttccggaattgtatgtttatttgaccaaactcctgaagctgcaactgcattagcttcagatgttaaaaataataatgtattatgtgcaattcctgaaaatgcaagtgttgcatctgtcatggaaaatgtgtgcatgtagatattattaaactttaaatgtgcataattattgttatctttcttacctgatacaatattaatgtaattcttcccatcattttctggaatatctaaaaatggaaatgaaagatgatatccagttgcaaatattatattatcaaaatcatcaactattaatccatcctcaaattcaacacttttaccatcattaattatagctttaatcctagcacatttaacatatccaatattggaatcgtttaaaatatcattcatccatttacctggaactagtttatcatcagttacaggcttaggtggttcaactgttgatttattcgttgataagtaaacttccttacatgctggaattaaatattgtaagatatcaattgcacttatacttgaaccaaccaataatacttttttaccactgaaatctttggcatttctaaaagactttgtatgaatcagtgcattcgatgaattatcacctttgaaagatttcaaatttgatatctttggaataaaaggaatgttgaatctcccagttgataccataactgcatcaaacacttcaatctttataccaccatctttatctaatacatgaataatccatttactagtactttcatccttgtagattttctctactgatgaattgaatttaatatgtttcttcaattcattcacatcacaaaatttttccaggtattccaaaacctgttcatgtttgataaatgggtaatatgggttcatctcaacattcgtatcacttaactcaatatcctgtgctgatgaaaacttcattgatccttcgggaacatttgaaaataaatgattataaatgcctgatttatcccacatattctttgaaatcttcattgactgacggaactgatatggtttattatattcttcgatatcatatggaaacggtggatcacaagcttcactgtatctccatgttccaccaacttctgaaccttgttcaaataatattatttcatcaaatgcacaatttgttggaagtttcttattctctaaactgttataactatttatagttgatgaaccattttttgaagtatgtaaaaactcattcaatgcaaccaacccacttggtcctacgcctatcactgctattcttttaatgtccatttattgttagggctagaaagaatttggaaaagaaagaacttgttatcaatatctctctttaatttgtataccatgacatgtcgggatttccttattgggtttttctataaattgttcaaatacttgaagtcataccccactgatcaatttttatttacaagtacgttgtattataggtgtaatatgatagttgtattatgataccaaaataataaatcggtctacttttaattgtttattaacatgaaattttcattttcattgatttcaaaaattgaaaagtttccttttacggaactgaaaactctttcttttagacaacatgactctctgtgatgtgtgtacagctaaggaatccaaatacacctgtccgaagtgtaaatggaagtactgttcattagtttgttttaaagatttcaaacataaagaacatgatgaagaaattttatcacagaaggaagaacatgtaaatgaagaagaaactattaaggaagaattcaaacctacagctgaagatgatggttctgatccaatgatgactgaacttttgaagaatgaacaatttcaagactatatctcatcacctgtattgcaattccatattcttagtataatagaaatcatcaacaatataggactaacgaatgaatattcaaaggaaggaaggttggaaatcgccagtaggaaactaaataacttaagagaaggtggtttggaagaaaatgaatttgttgaggagtttgtccaatggttattacaatggttagaaacatatagagagaataataaataaatatattaataaatattactactataattgaaacttgtactttggaacacctttgatgtttaaacctgaaacatcaatcttatacaaagcagcacccaaatcattatcatttggttcatcatcaggtgttaaacttgcagttgtaacatataaagtattaaagtctttaccaccgaatatacaacaagtaacattcttacttgggaaaatccattccatatcaatcttaccatctggtgtgaaacgaacaactttattactaccccatagacaaacatataagttaccatctgcatcaatacatgaaccatcaggtgtaccattattaacaaaccatggttcctttgaattaatatcaacttcattagtttcaacattatatttatatctataaattgtaccatctgtagaatctgtccaatacatcaaacctctagtaatatcccaattaataccatttggaataccacaatcattccataattcaattaatgaattagaatctttatttgataatttccacattgatccaaatttaccagtttcttcataatccatagtacctatccaataagatccatctggtgcaattgaaccatcatttgatcttaattgtaatccattaacgatgttatcattagggtatttagcaattgatgtaattgaacctgagtttaaatcaagaactgaaatacccctttcaataccacaaattaacttattaacatcagaagttaatccaataacaccaattgatttatctacaacataagtttgaggaattggtaatggtttatcagtatttgaaagcattgaagattccggaatggtgaaaaccgttccagttggaatatcgatataatataaagaatctgttctttcatcgtatgtaacaccttctaataatgatccatgtggtaccacatggctattttccactttaaatgtagacatagtgattgaagaaaacaaagggaagaaaaaggagatcagttgaaggtaacacaagatacatcaaattcgcataccaactataaacttacatgcatgaaagtctttcttctgaatatatggatcaatacgatatttcattaacgcaagtacatgcaccattggttgtcatccagggtatctccaagacactacgtccgggaatatccaatgatgaaaataaaaattcaactgattcatcattgtatgggttagaaattacaattgaacgtcaacttgatgatattcaatcaatttatgttgaaagatttgtcaaaatattccaacaatataataatagaggcaagtattggtggtctggtagtaatggtagtaatacaatatctaatggaatgtggtttaatattaaatatgttgaacaaaattgtcaaattgttgttaatggatcaggatcacaattatcaccatataattcaaatagtcaatattatggatcattattaccattagaatggataaaaaaatatgttgagtatttaccaagtgttttcattacagtatatgagattaagaaagatgataaattagatgcattaatgattgatgaaattagtaggattaaatcaagatttaaaaatagtaatattgaatatattgttttattaataaagcaagaaagtattgataaattggatgaattacgtatgagtgaattaatctctaaaattacaagtggtggtaaaacttccttgtatataatgaatgaaggtaatgatgaagattcgattagggaacaaaatattttttgtaagaaattattatttaaaataagaaaatattctaatgatttctttgatttaaagataaataaattaaaagaaaagccaattaaggatgatcaatatttagagaatttctttaagactagaaatttaattaaaatgacattatttgaacaatttaaaaacattaatgattattcaacaaaattattagaatattcatatgataaattattatcaattttaaaatcaattgatgaatcgtcgtacccattgccatatagacaaatttgtcaatggttagatataatttgtttgcacattgttcgtgcatgtattaaattacatgattataatgtttcatatcgtaaatttatgtttcatttagaaaaattaccattaattaataatagaattttcaatactacatggatatctaatcaatataaatggtttggagaattgattaaatattcaaatgatgaaaatttgattattgaaggttcaatgttatcaagtaataatcctatattaaagggtaaaaatattgttaaaaattcaattattttcaatagttttaatttaccacagaatggatttattttcttagaagcttttcaatatagaaaacttgcggaaatgaagggagaggcgacgattaatgataagaaaacattactcaattggtcattagattcatttaataaggctaaagatgggaaatttaatagaattgaatcgtttatttacataatgttgggtgatttatattatagtgaaaaaaattatagtatggcagttaataattataattccgttttgtcaatttatagacttgagaaatggaaattattaattagagaaattttaataaagatattaaaatgttatattgaactttcaagagttaatgaagctaagaaggtgttcattgaattaatttgtgtttatgataatgatgatgaaaagtttaaagagtttctaaaagaatcaagggataaaatagatagtttggaattaattgaagatgattcacaatcaattatagtgaaagaagcagatgatgatgaagatgatgaacatgaagtatttataaaggaaaagatattcaatgttgatgcagttgtcaaaaaataccagaacttaatgaaagatggagttgatgttcaaatagttattgagaaaattagtaaagttgaagagttagaaattactaaattagaagttgatattggtaaaattggtaatgaagaagtcgatatcaaaaaaattattaagaacaaagatgatcattttatattcaataaaggacgattgattgttactatgaatataccatttaaacaaactggtaaattttacatatcacatattaaaataaacggaagtgtcaatagtattaaatttaatacaaatactaatatagatgtgagtaaatatgagagatatgttacatggtatgatgaaaatggtcaaaatgagagtatactttgtcataatccacgtaatgaatttaggataataccaagaatacctaaaattaaagttgtgctaaaatacgataatgttacatataatgggcgtaattgtcctattgatatactatttgagaatgaagatgttaatgagggagaagatgttgaaattgatgttatagggtatgctatgattagagataagaaattttctattgagtgtaatgataaggaggataaggttttgaaaattggttgtaagaagttaatgaattggaatgtaaagataccacaaatacgtaatcttaaacgagatattaataaaagtgaagaatgttatattaactttgaaataagttataaacttattaatgaattcaatgtacgtgtttctactgaaagagaggcaagaatgaaaatattggaaatgttggattggaatagtgaaatacgtgttgagaatatcaataaagatggtaatttacaggataagagagtttggaatattaaaagtagtgttaagaatttaacatttgaagatttacatattaagaatttacgatttaaagttaaaggaagtaaagaagttgaagcgataattcattgtgatgatgaaaagggtaaacttgaagaatttaaagaatttaaagttgaagagagtaaaattattgaatctaaacttgaagttaagtcaattaatggatttattggagaggtaccaatattagttgaatgtaatataatttatgaggatattaaaggtaatgaagaaatttatattgcagaagttttcaatggtataataagaataggtgaaccaagagttatagttgatttaattgataataatgaagaaattgttaaaattttatataaagttgaaaatcctagtgaaaatacaattatttgtcaaacaaatcattcaaaaattgatggtatgatgatgaatgaatatattaagaatggtacatttaaggttaattcaggtaaatattttaatattcaacaagaatataatatttctaaatgtattgttaaaattgatattagattaccagaatttgcaatttatgataaaattaatggtattttaatgagaatttggagttgtaataataagcttaaaattgaagatggtagaattgttaaatttcaaaatatataaaaagctaactatatagatttatttaattaattaatttttaataattcaacatcaaagattaaagttgacattggtgggattaaacctgggaaacctctattaccataagccattaaaggtggaactgtaagacgagctttttcacctaatgataatttagcaaaaccttgttcccaaccttgaataaccataccttgaccaatagtaaattgaaatggtttatttctatcaattgatgaatcaaattttctaccatttgttaaagtaccagtataatgaactgttaataaatcaccattttttggataagttttaccatcacctggagtaatgatttcaatttgtaattcagttggagcagcagttgacattgaactgtagataggtcttgtaattgatgatctaattaaaggtctgaaagcagataacatgtttaataaatgaaagaaatggtgatgttgggaaaaaaggtggagttgagaaaagaaggggaagggcgaattggaaagaggtcttttcataataagaggttctttcttttattagacaatgactaatatacatccaagatacagggaatcacatgtctttaatcacgatacatgtagtagagatgcaatgagtattgaaatctttttagattataattgtccatattctggtaaaatgtttaaaaagattattgaagaagtaattccacaattaattaaaattgatggtaatataaacaattatgaatttacatttgttaatgttattcaaccatggcatggaattcaaagtagtatcttacatgatgtatcatttgcaattagtagaatattaccaaaagcattttatcctataagtaagatattatttgataatattgagaaattttatgatagtgaagtaattgataagagtcgtaatgaaattgttgaagaaattttacaattaataccgggggaaataatttcaagtgatggaattaaacaaattaaagatttactttcattacaaggtaatggtaatataggtaatggagtttcgattgataataaatattttacaagatattcacgtacactaggtattcatatgaccccaacagttgttattaatggtataattcaatcacaaattgagagtagtacagaaagtcacaagattattgaaatattgaaaattttataaaatcactataagtctataattagattaataaagtttcaattttatccttaacaccataaatttggtttttaatagttgaagcatcattagttgtaattgaagcagcaattacaggtcttgaaacaccacaagctctaccaagagcagctttagatggaacgaaaacgtaaggaacatttttatcttcacaaagtaaaggtaaatgtaataaaatttcaattggttcagtatcagcagccataataataaattcagaaatacctctattaagagtctttgttgtttcatttgcacctttctttaattgtcttaaattttgagcttgttgaactaaatctaaaatttgttgagataaagcagaatctgctaatgggaaagcttttggattaacagcggacattgtagtattattaagttatttagcaaaaatatagattatatgaaagttccttgctattgctcgccttaaagaaagaagtaaagtaaagtaaatgaaagtaaagttaagtaaagtaaagtagaggtatagtaaaggtgaaaaatttttattttatttagtaatagactgtatactctattaaaattatttttttttcctttttgcggtcgatgcgtcggtttcttttaaaagggtcgatgcgtcggtgtgttacgtaataattatatcttgcgtcggtgcgactgtggtataatataaattattttagggacgatgcgactgtgtagtgatatactgtaaataggattcaaaaaatggctgcttctactattctgttaatttacacagactttaagctattattatactgtaattgacaatttaagataaaagagattgattttatctttattttattattttatcttttgtatctttcttttcactaaagtcaattactcttactcatataatgtcatcagatctttgtcctgtttatgctcctttctttggttcacttggttgtgcagctgcaattattttcacttgttttggtgcttcttatggtactgcaaaatcaggtgtaggtatttgtgcaacatgtgttttaagacctgatttattaattaaaaatactgttcctgttattatggcaggtattattgcaatttatggtttagttgtctcagttttaatttcttcttcattaaagcaacaacaagctttatatactggttttattcaattaggtgcaggtttatcagttggtttagcaggtttagctgcaggttttgcaattggtattgttggtgatgcaggtgttagaggtactgctcaacaaccaagattattcgttggtatgattcttatccttattttcgctgaagttttaggtctttatggtttaattgttgcattattaatgaattcaagagcaactcaagatgttatttgttaaataaattaaaaaaaaaatttaaataatcctatttatatacttattatatacattatccattaaaatttcatcttgttcattaacaaatatttcaccctctttattataatgttcaaaattttcaaatctaattaaatctttacgtgttataataccaactaatttaccttcttcattaatataaacatttttactaccaatttcagtgaaaatttcaaatatcatatatgcacttgaatttatatctaattctaaaaattcagtttcaattaattccccatatttattatcttcactaaaatttataaattttctctcaattaatccaatttcatcaccttcaacattattatcaccttgaatatcattcaatatcttttcaataacttctctctttaaaactcccatcatattctttctaccttctaccacaggatattctcccttatcatattttaatacttttaataaatcattactccacataccttcataatcaatacaaattacttgtggaaccattaattctctaactttaatatttaatttatgttcctcatttaaatcaataaatggcataccattaaatttaatcatttgatctgcaattccaccaaatccattaccgaaaatttcagttataattttaactgttaaaattgtaatcatacatggtataatatatttaactgcacctgttaattcaatcattataacaacaattgtaaatgttaatcccgttataccacttaatgctgcacctgcacctaaaaatgaataaatacctgaattaatattaccaccacaatttttaactaatatacctaataatttaccaaatgtacatccaattgtcatacttggtacaaatataccacatggtactttactaccataactaattataactaataaaattctaataattgttgcaaaaattaattggaaaacaattaataaccattgattttcataatttatacaaatttcattattttcatctccttctttattacatggattaaataaaatttccattactttagtcatttctaaacgtaaaaatggattccaatatccaataattgaagtaattaaacataatattaaaatttctttaattggattcccatttaaatatttttgtctaaatgaaacatatttaatattatatttaattgtaataattccataaattccaccaaaaattccaataattataaaccaaaaaatttctaaccatgaccaatcaatattataactaactgaaaacattacaatttgaccagttttcaatggattccataattttaatgttgaaactgcaattaatgatgtataaaaagttttccataatgtagttaatttaactttcccactaatttcctctatactaaataaaacaccaccgatgggactaccaaatgcaactgcaactcctgtgcctgcacttgaaattataatatcacttaattgtattggactttcccttatccaattaattatattctttccaataatattaccaatacatgaagcataatgaacacttggaccctctttaccaacagataatccagatgcaattgttaatggtaatgtaaatgcctttaataagaatactttcatagataaaaatttatccctccaaaaacctgatacaatacatttaatttcacttatacctgaacctgttgataatggttcaattgaaatacataaataagatgctaataatccgaaaaatgttgatattattgtaaatattaagaaattaattattgaataatttgaccaattataccaatcattattaggacatgttgattcagttaaataaatatttgataaacaaatacctaatttaattgaattgaaaaattccgttaatatagtaacaattgcagcaattgaacctattattatacctactatcgttagaacaaaccatatttgaaatgttgaccaaatacgtgattgtataagttttaaagttgatatatgaaatgttgaaattgttgttataatagaatcttgagttgaaggtctagagaatgttaatgaaggttttgattttaattcattataatatttcttattttctaataatttttcattcctccaatcgattgttttataagaatcgaaatttcttgataatttttgaatttgtggatctgaattatatgaatgttgccacattgttaaaggaaactgaaggaaaaacgtgtagttaaaataaattaacaacttttaaaaatctcacaaattagatataatggatacttaattattattattattaaaaaatgataatatactaatattatattgtatataaagaataaataaaatgacaaatatgatatgatataattataaatataaatataaaacacttaaccaacgactaaagtttcttcatcagcaaattcatattgaggaatttctaaattaagtggagctggaccttttctaattctacctgaaatatcataatgagaaccatgacaaggacaaaaccaaccaccaaaatcacctgcttcaccaattggaacacaacctaaatgagtacaaatacctaacataattaaccattcaggatttttaactctatcagaatcattttgaggatctcttaaagttgaaatatcaatatcatttgcttcttcaatttcatgtgaagttctatgtctaataaagactggtttaccttgccatttaacaacaacatttttacctaatggaattgcatttaatttaacttcaacttttgccattgctaaaacatcagcagaagctgacattgtacttaaaaatgcttcaacagttgatttagcagctgctgcacctaataaaccataagatcctaccataaaatatgtaaaatcttttgatttattatttgcacctttagaattatttaaataatgtttaaaatctggtgaatcatatgttgattttaataatggtaaatttgatgaaaataatcttttagaattattatttaatgaacgtaatgcagatgaacgaattggtgaaatcattgttagttggtaaaggagagataaaaggtataaaatagggggttaaaatgtaagtaaaatctaataaaatctaaagtaaattcaaataatcaataatcataatataatttttccagcataacaattatcgacttgaaattgaataattataatgtgcttatttctcattggttgagtaattgagggtaaataagtataagtgcttatgtaatcagtgggtgtattatgtaatcatgatgctgctattactgattattattattattatgatggtgtaccaatgttgcttatgtcatatattatttatgattaagtaagccgatcaagttatcaaacacctcagccgcatattgtttcttttcagcaaagtggcggtgtatgatagcagaatgattgttaatagttacttcctctagtttctctaatttatcaatgtattcttccttcatattggaaataactacatctggagcatcattaatagttgaagttgtatttagcagcataccatctaattgtccaatatcaattgtgttaatattattattagtagtagtagtagtgttattattattattattattattattattatcgttattattattattgttattattattgttattattaactgcatttttattagctgtatttttattagctgcatttttattagctgcatttttattagccatgtcagccttacttggtctacctcttttacctttactttttggcggctcagcggttttttcctcataatcttcatcttcttcattatcatcatcttcttcattatcataatcatcatcatcatcatcatcatcataatcatcaatatcaatatgacttcttgtctttctttgaagtgtttgtgatatagttgcttgagttgtcttcttttttgaagttgttttagttcttgtaaatttttttgctttaccttttcttttacgagtacgtttcactggaacttgagctggtacttgaacttgaactggtactggtacttgaactggaattggaattgtaactggaagtgtttcaattgtagtagttgaagtttcaattgtattatttattggtgattcaaaagtattaattactgcatcaaatgttgaagtaatatgtggttcacccattgtattattcattggtgattcaaatgaattaattactgcttcgtatgttgaagtaatatgtggttcaacaattgtattatcgattgttggatcaactatattaagtggattttcagttgtattattaattgctgcttcaattgttgaactagttggtggatttgataattcatttggtttccccatctgtactctaaatgttggttccttaccaatattggatacatctacaatatctacagattgtttaatcattttgttcttgatttactgataagaagatggtatcgatcgatgagattaatttagataaggagccaccatcgcgtaaataataccatcaccttttttttgtttaaatgaaccaatgttgtcgttatagattttaaatttgtatacaggactaacaatttagagtaatgaaataagaaataagaataaaaaaataaagtaaaagaaaacaataaaagaacaataaagtattttttttaatatacttaattatagaaaacaaattttgctttaccacttgtaactgaaactgtacaaccatcttgaccattaccattataagaaccattttcataaacacaatcaccaattacaactgatgaatcatcatatgcaacaattttaacattataattagcagcttgtttattatttggatttggaattaatgataaatatgcaataccattggtataacctgcaccaaaatttaatggagcccaattaccaacacctgaacctgcttcaccccaaatacaaccatcagtttgtgaaacacctgcattattaacataatattgagcagaagttttcaaacctttccaattataataattatcttcatcaacagttgttaataattcttctgaacctgcaccaacaattgttggaataaccatattttcagtacctggataatcagttctacaaattgcaactgattgatcaatttcactaacaactctagccatatcaactccccattcacataaataatttgaattttgattagttttataaagataaccatttttacaatataaaccaccaactgaaacaccatttgcaggttgatttgaaggccattgagttttagacataccaggttgacaagcataagaacaataagtaccatcttcacatgaaccaccagttgaagtatcatcatgataaagacctgaccaaccaccaaaacctaaataatcaagtgcaacaacaccatcaccacttgggaattgagaacatggaacaacaccatcttgaaattcatttgttggtgcttgataagcacctaaactacctgatgattgataagtataagatttctttgaagctgatgtagttgtttcttcagatgatgatgaggaagatgaagaggtagaatcatcttcagttgttgatgaagatgaagaagaggtagtagctgcatcagttgaagttgaagcagtagttgaagtttcttgttgaacagttgattgagaagttgttgattgttcataagttacaccatcaccatcaacagtaacggtaacataaacataatcataagcaacagctcttttatgttgatgatgcatatgataagtttgagttgttgtacaatcatcatcattgttatcagaagcaactgaaaatgataataatgaagcaagagagagtaaacaagtatttgataatttcatctgtaataataatataatatagttggtattcaatgttagtatttatgatctatattgtatgatgtaataagaataataataatagtaataataatagtaatagtaaatgaaacaaaatcgcgaatttttaaattttttcccatagtaaatagtaaacataagggatatttttagtaagtgagtgagtgagtggattgattttattattattattattattatattatggtattatttgtaaaagcgtgtttgaatgagtgtaaatgaatgaatgatagtaataatgatataatacttactttaatttataataatgagtgactaagtttaaaataatttttttgaatgtaaataatatacagtgtaatttaatttaatttaatatagtaatttttttcaacaaacgattaaggaaagtaaatagttgggataatataatgtaattaaatataatatcgtagttgaattagaatgttgattgattaatttatcaaaaaaggagtgacttagtttagtatgataaatgaagggaataaaataagataagataagatattaaatcaaatcaagaagagacatgagtagttaaatataaaatattagcaaatagccaaaaagaaaagaaaagaaaggagaaaattatataaaacacccgccacttggaaatttaaattttaatttgaattgctgtttttctggcgtgcctcggtgcgtcgtttgttgctttttattttctttgcgtcggtgcgtctgcaatgtatttagaagtcgatgcgactgtaatatatattcctaacaattacgtaattcctaaaataataaataacggaaatagaaattccgggggtgcaaacataatattttaatattttctccctattttctccataatttccctattttctccataattcttttattatccccttagtaagaggtaaagaaattaagaaattgacttcttctcaatatagaattctaattattacaacataacttttttaattttattattttctattttcttttcctctctatctcctttcattaatcatgtcacaggaagtctttaatgagggtccaacgacttctcaacatatagattcaaaggatgataatcatttccaaaatacaacttttaaattaaagagaacaagatcaatggggttattaataaataataataatcttaataatcttaataatcttaataatcttaataataatttaacttcaaatactactactaataatactcataatacaactccttcaaagattaatcatagaattcaaagacataatagaattcaaaataatactaaattaacttcaggtaattatattcctcaagaggcaattaataaattaaatcttaatttaaataataataataataataataatacttcctctaatattgataataactcctctaatattactaccaccataccacaaataaattccccacaaagtttccaatcacaattttttgatgataattataattcagaagattcattctcttcacaatcttcaaataattcaaattctgctccaatttgtctcataccgaaacatcaacagaaaaagaataatattaataataataataataaccttaataataactctaataatacccatatactttcaccaattaatatattacatgatgatactgatgttaaagattcacctgatcaacatgttgattatttaactcataaatggaaagaagatgaaatttcaaaatcttggaaatatgttactttaagaagatcagcagttgcagattctgctagactagaaaatgcaagttggagaacttgggctcaaacaagacttaatttgaaaactatttctcctgaagaattaaattggtcaaaggaaaatgacgtcacttggttatatggtcccgttataactcatgataatgaaacaaattttaatgataatgatgaaacttatgaaaaaaatgaaacaacccctaatgataataataatactaatgatgaacatgataatataatatcccctaatgatcatttaaaatcaattttaaagaaaaaatcaaatgttgaaaaagttataagtgaagcaagttatagtaaattacaacatttattagaaaatagggaaaatagagaaaataaggaaaaaaattttaaatttccttcaaattctgtatctgcatcaaattcaataacttcatctccaatgattgatccaacaattactaatgatcctaaattttccccattaatgacaaatactaatttttcagattcaattataataccatctcataatttaatatctccatctcctctaccatctaattcttcatcttatgataatactaataataataccaacagtgatcaatcaaataataaaatattaccatcacgtataaaatcatcattgaaaacaacttcattattgaataataatagcaatctaaatactactccattaactaattcaaaacatattcattttaatatgagagttgatcaatgtattgcaatcaatgatagtgatgattataataataaatcagatgatgattatccaattgataaaatggttagttctaaatatcatgaagatcatgaaaataatcatttttattcaaatgatggatttgaaagtgatattgatattgatgataatgaaaatgataatgataattataatggtgatgatgaaaaagattttgatgaaggttttgtattaacaccaactattcatgttaatatatctcataaacctaatgatggtaataataataacaataattctaattctaatgaaagggatattataacaattgctccattacctgcaacaacattaaaatttggttctgatgatgaattggattatccaaatgattataataataataattcaaattataataattataataataataaaatgtatacagtttctcataatacaaagactaatcgtggatatgattattattatgattataatactgtttatagtaataattcaaatccaacgatatacaaaccaaaggaaacaataaaagagaaaaataataataataatatgaataacaatatcgacaccactgataatactgatgatgatgatgttgaaatgtatgatgttccagttgatttccaaatgaatgaatcaaatacaagtattaataatttgacaggtttcccagtttattcatataacgatggagtaaatattccatcatcagatccagctccattgaaaagaactgaaagtattggttcaaaaaattcttcacaatcattatcatcaattaaagttggtttaagtggattagatttatctaaaactggattaaaatcaagtacaggtttaggatctaaacctcaattatttcaattatctcaacaatcatatgatactccatcacaatttattccaaaacctcaatcattaacaaataatagaaataaatttttatttgatgattctgatgatgattctgatgatttaatgattgatgataataatgattatcaacataatgaaattttaaaatttgttaaatcaggttcttcattatctgaattgaataataaaattacatcaaatcctaccataattaataataataataataccaataataatacttttgattttggtagtgatagtgaaagtgacagtgaaagtgattaaaaactaatgatatatatatcgatatttatatagttgattatggaattaactattcttgtataataatagcaatttaaaaaaaaaataattcattactttattcttgtttatatttttcagataatgctttccaaacaccagttaaatgaaatttaattgtgaaaatgtataaaattaaaaatcttgggaaaattgcaacaagtcttggtaatattgaccaagtacctaaataaacatcaacagttgaactccaaccattttcaatttcatcaattgccttaacaacataaattttcggatccattggattattacgttcagacattttttgtcttgtttcaaatgctgccttcatttcatttatattataaatactatcctcaggtaatgatctcttatctgcaatatctgttttaacaccacctgttataaaatttttaactttaacattaaaaggttttaattcaaatgataaaattgatgcatattgaccaattgcacttttacttgcaccataaattgaaccaaatgggaatggacaataacctgctgctgaacctgtaaatgcaatcgtaccccttttagcaataactaatcttgaaaatgtatgaactatacgtacaggtccaataaaatttgtattcatacattgaattaatgcatcatctggaacatcaattgcagggaatgtacatgatgaacctgcattattatataaaatatctaaacctgataaatttaattcatttaatttattatttacaaatttataaccttcattaattgaatcaattgatgaaacatccattttaaatgttataattttatttggatataattttgttaattcattcattgattcaagtctacgtgcacatgcaaatacataatatcctctttttgctaattcaagtgctaaatagtatccaatacctgatgaacaaccagtaactaatgcagtcttatcactcatcttccttgtatatacctgaaaaagatgctaattcaattaattcaattaattaaccaaaattgaggaaattaaattaacatgtttttctatcattattcaatatcatcacttcttttctaatttctttctcctttcataaacgcaatgtccaagtatagtaagttagataaaacagataatgttgactttggtccaggattagtagatgttgatcttaatgaatcaattcaagataatgataatgatgatattttcataacacctgatgttcaaacatcatctaataaacaattaccttcaccacctgtatattcatcaactgccaatgtctctagttctacttctgcacctccaccagtaccaccgaaaaaggatgaacaattctttaatttttcatcatttattacaccaggtaattcatttggaatggaaattgagacaagagagagaccatttactggtggtaatacattagatgaatcagttttaactacattacatcgtgatttatcaacaattggtgataaattattatcaattctttggccattaagattacgtcaatcattaatatcagttcaaaaattaagtgatagaataactggtgatagaattataacaaatgataataatattgaagatacaattggatcagattcaaattatatttctggatcacaggatgaatattcaacagagacaatgaaaaaaattagagattgggatttatggggtccattagttattaatttaatgtttagtttaattattacttatttacaaagtaagaaattaaattctaatgataataataatgaaacttcaagtcaaattttcagtgcagcatttacattaatttgggcatcaattgcaattttatcagttaatattcaattattaagccctgtacaacaaaaattacaaaatggtggtgtaactaatggaattgttggattaagttttttccaatgtattagtcttttaagttattcaatgttcccaattgttattggtggattaatttcatgttttgttccatataaatttgttaaattaataataaatttaataatgctttgttggtcattattatgtacttggctaattattgcaattttcactaattgtaaaagaaagggtacattaacattaattgcaaatgatgatgataatgatggtgataagagaattttcttgatggtttatcccgtattcttagtttatggattattttcttggttttgtgtaattgtttagattatttattcatttaatttatataccgatatatctattcattaggaattgaaaaatactctcttatttcacttttactcataccactaggatttgaatcgtatataaatgaaactaaaatatcaaaattatccatcattatttcaattgaattttccatctcttttattactgataatctagtttccagtttttcaggtgatctttcaattaatttatctatttttttatttatttcattattctctaatgttaacttattgattgtttcaataagtttatttctctcctttttacccaacttcctttcatttttcaatacttgaatttcctctttataattatcaattaattttaacatttcctctttcctgattttcaacctttcataatcattatttaatttcattataccagtatattgaaatgaccaataaatatttgatataccacatttttcacaattaactaatccatcatcaactaacattttcaaaatatccttgatttgcattgaactaatacctgtttttttacttgcattactttcaatctctttaatagtatacattgtatgatcattttgaaaccattttaaaagttttgattgcttttcatcaattgacataccttttttgggaccctatattctacatgttagtacatcaattacaattacaatacgtctattactactattctacctaccatattgttgtttagttgtttgtattaaagagtatacagttatctaagaaaagaagtaaagtgtctctatggctgagccatctcatttataaattccagattgaataaactgagccctgagacatgtattgtattaaattgtgtgtgtagttatatagcgtttgccttttctttactctctgttcatgtagtatgctagggagttgttaacaggaccacctagaagagtcactatcttggtatctgagatgttgtacccatttatttgttcagttgtctgtattttgaaaactaattcaagtgttttctggaatactggtttatccttaattttattcatctttagtatcttatttgatactaatatcttgttttcatgtggtaatttgtaactaccaattgcttggtgtaaacaagaaatatattcaatccattgagatgaatttttaaataatttactaacttccaaatgactattagttgataattttaaacttcctgatctgacgtggtatcttaatggatcctcttcaatatctttacataatttcaataaattttcaatgtctaaatattcaggtatttcaattaattgtccatatattgtatttgataatacaaataatgcctttttaactaaggctaatttagaacaaccggcaggatatctaccatgaactgtatcacgaatccagttgggtatttcaggtaagtttttaaatttatgtttcaataaattatcgatttgaagatgtggtatgtctaatttataaaagataccacgagttgaacaccaatgactgaaagctcttaatgcattatatacatcaactgaagataatgcattttcaccacaattttcactaatgattctacgtaatgcataaccttctaaatttggtgatgcaacattatgatcagtttggaaaaaattaatctttgttgcaactaaaatcattgaacctaagaaaattaattctgatcttaattctgaatcaatatctgatatataacttaatgcttcgtcctctaatgaaaatatatcataagatgaattttcaattgaacatattttagaactttcatcataccatttattaagttcaatttctcttgatgtgaaaataattgcaagtgaaagtttagaataatcagttaaaattgaaccacaacttttcaaaatatgatatgatgatagaattgaatgattatatttataattttcatatgaatcggagacaattaaatgtttttcttcaccttgaacacgtatgaagttaccatcagaagtgagtttatattttttaccgttctttaaatattcgttttggcttaatttattcattgttatttgttgatcctgcaggattgcatcacatattgccaccagatttttcgatatatcactcagcattcctactctaattgtcgttgaaatcaattaaatatctttaatgcttgttttgatctggatcagtttcccaaagtggtaataaagctggaaaatggaaaataattagaaaaaaaatatgaaaccgtcgcaattttcgcaattttcgcaatttttgcaaatctcacggaatttcctttttttctttttgtttcttttggaggactattaataacatctaaacatcatattaatccgttgagaaaaaattggtgtttttctgttcttttcctctgcctttactagtttcttttcttttgattggaatctctgttaagccttggtttgaaacggttttgaactcattttcatttaaacattagaacctattcttaaaattgcatttgctttaaagatttaatttcaagttgattaattagcattatttcacacatcatttcgtctagatcaatcatccctttcgtatcaacaaatcatttcaatctatagatttcattaatttcacactttactagattttgcattatattattacattagagtatttacatacataaattatactatttaaaaaaacacatatcataaaaaaaaatgttattcaattttaaatcaaatcaaataatcctacttatttcactcctactcagtgggatcaatgcggcagatggggatacaactacaactcctataactacagttcctcttacaacagctgttgttgctgctgctgctgtaaccactacaactactccagctgctgctgctgctgctgctgcaaccactccaaccactacaactactccagctgctgctgctgctgctgcaacaactccaaccactacaactactccagctgctgctgctgctgctgcaacaactccaaccactacaactactccagctgctgctgctgctgctgttgcaaccactccaaccactacaactactccggctgctgctgctgttgcaactactccaactactgcaaccactccaactactgcaaccactccaactactgctagaaccactggtactaatacgaataccgctactacaactggcactgcaactggtgctgcaacaactaaaactactaataccagaggtataaagacgactgctgataaaactgccaatgcagcagatcattatgttccaattaaaacaccaaccactactattcaagcaactgcatatacaacagatttaacatcatcaagtgttgataataccattgtttggttgactacaactatcacaaagcaaacatctgaaatcacttcagtttactccgttgcttgggttcaaacatttactcaaatgtactcaactgttgaatctgcaccttctggtactattggtttaggaactatcaaaggtgaagttggtacaaccagaacttacagagttatacagggttagttttatccatcatagtttactcacttaactttccactcattacgtttatttagattgtcaacttttcacccactataccactatcgtttatatctactttttgtttttttgtgtacaacataattgtttttttcctttataattcctctctaaattgaataatttagttaatacatctcttttaaaaacaggaacgttaaaagtagaaaaaacggttctcatgtatatacatcgatgctatgtgttgggttgttgtcgtctgcaatataatcaatgaatggattttatgaacttctcaatctctcagtgagcacgctactacagcttcacagttatacgtatttgatttaacatggaattacatagtatacatactatattataaacattataccgggtaaaaatttccaacttttttttattaatctattttacaaatatcaatcattcatcagcaccgaattccattggatcaaaattacttcttagtatatctctattttcaatttctgatcttgttggttctctaattattaaatctatttcatcatatgaaacttctttaatttttggtaataaatatggatcaattctacatttcttcaattccattctagatgatattggaacataatatgctttatttgtcttttcatcaaacttaataactaattgacgtaatggatcaacaggtttttctgaacaatcatattctctttgtttcttatataaaactttcttagattcatcattagtagcttcctctaattcatcatcatcaattggtgcattttctgtttcatcttcaagtttttccttgacatttatagcattggattcatctgttaaataaaatgaaactaattttgtagtcttgtttaattctatctcttttaatatagatgttaataatcttggatcatttattgattttatagcgtccttagatttatcagtgtttttggagatactggcagaactaccaaatctaatatcataaaatttttgatctaacattgatgtatctggtaagaaattccaaatttttttagcttttaaatgtttctttgttggatgtttaattgttgataaatctacagatgatgcatcaaacatatcttcaatagttttcaattgagattttggatcaaattcattttctctctgtggtttgatatttggtaattttacagtggccgtactagcagaatttgcactactttgaatatctgatgaaatatattgtgttcttctcaaaaatccaacagaatctgatttagtttgaatatgctttgtaggatcagctaaaagaagttgatcgcttggatgtaatgtaagtggtgagttatcattggtcactccataaatagtttctttgtctggtaatgaaactaaattcatttgcatacctaaatcttcatttaatttgattaaattcttgaagttttcctttctaaagaatgaagaaactatagatttcactccagcatcaagatcagtcttattatcctttaataactttggaggacatgctggtggtggtaaattattagagtatctgactttagcaacatactgaatattggatttatgaccattagcagcatgtttatggttttgtgatgaaggtttgtgggaagatgacatttatgattgtctgtatactccagttattgtcacctctgatgatatctatgagtaaaaactatacaggataaacaacagagaaaaagaacaacttcacactaattcaatttaagctgaagtagtattatttcattgtcgagatttctagtctgtttatattttcattttcctatactaactttaattctttatttacattttgttgattgtttttttgttattttttaaggcactgtagataaatggaagcttatggatgctagatcaagactaaattctgatgaactcttgttttcaggtgtgacttttactacaactgatctcaattctaaggaaaagagacaaatttccgatgctgtctattcaatgggaggtaaaattaaaaatgatttaacaagtgaaactgatgttttaattgttggaagtgtagacactgctaaatccaaatattgtataaataatagaacagatgtaactttactttatcctgatgatttattggatatttatgttaagttcaaagagaaaaccaataaattgtcaattcaaatactggatgattatccttggcctattttcgattcatcattattttgtttatcaagattaagagacatggagaatccatgttatgagaaaaactatataagtagacttatacatcattttggtggtaaatatgtggcatcattaacaccaagagtgacatatttgataactgataaaagagagggtaaacgttatgaaagtgcattagaatggaagattaatccaatacatcctaaatggattgttgattgttgtaattgtcaacgaatattggatccattgttgtatgatatatcaagagttaaagattttttacaaattgggaaaaactcccatacaaaatggagacatgttgttgattatggttctgttgagaataatccaatttttgatagagttcaaaaggaactgaagaaaattgatgctgctaatcagaatagaagtttgatacgagagccattgttgaaaggatttgtttttgcatcttatggattccaggaagctcaagtacagaaattaaatcaaatattgaaagataatggagcagaatttcaagatgactatgatttaagtataacacatgttataataccttctagctttacattggagcaggttcctgataagataatcaatttgaaggaaatatcaggtactaagattatcaatgaatggtttattgaaagatgtttacattataaaaaagttatggaagattcttggtcattacctttgaacaatttgtttttagattatagttttaagatacacattacaggatttacagaaattgaacatctacatatcaccaaacttgtcaaaaatttaaatctaaccttgtccaatgaactcactgaaaattgtgattttttaatagccaacttatcttcattaggattaacgaaagataattcaccgccaatctttaattacagatttaatgacatattaacaagtaaagctaatatgacccccgctgctataactttaacgaaaaagaaaattaactctgcaaaaaagtgggatataccagttctgagtctagcatttctctgggagttggcccaaactggtattttaccacatataattgattcaagatggtgtgtgtttgcacctaaaagtttaaaacctgcaaataactttcttgaatatgcaagatctgtgtctggtggcacatttcaaacacaggcaaataaaccaaggcatccggaaagtgatgttgtacgagtacagttatccagtcatgatgaagaacaaagtcacatacaatctaactacagatcatcacctacaaagctacctgttcagttaccttctccaagaaaaaacagtacaaaaaaatggccaaaattgataggaactgcttctgaatcacaattgaaatctacaagtactgtcgatgataattatgaatttcgttcagcaagacgcttagtatttgatgaaaatgacaataataataatgaaaaggataaagataaaggtagttttgtagattttgaagataattttggtattgatgatatacccgtattcaaaaaaagaagattttaaaaaaaaaattatattattctattcttttaaaatacacatgtataatttaatgaactacattcaataataattaaaaaatagaagttaatgggtaatggcatcaattggtaaacaaattgtaatgccaggaatttcaaaaagcaaaaaaaatattgtcaataatgataactgtggggttcgaacccacgcctccgaagagaccaggaccttaacctgacgccttagaccactcggccaagttaccagtatttacccgtattttttgaaggtggctcaggatgttgcagagtaaatttttgaatttttttaattgcttttttgacggtttgaatcaatgttttgagtccccttcttgttaatttatactagacagtgattgaacatttttatcaaccacttttttgagccattgacgcaaaaaaaggatagtagaaatttttccattattttaaaaaattagtgaatatgttaaaacgatctataaatttaaattacaaaaaaaatgttacacatttaagaaaatcattcattattttcttcatgattttcttcattagagttctcactaataaaactaacaggttgttcaccatctaactcataatcataagtaaaatgtttccaacgatcatttgaataaggaccgccaagtctactatctttcattattggagcagataattttttaacacttgaagctgaatcgctttgttttcttgatgattgtgatatgctatcactacgtttactcttggaatgtgctctactatcaacagtattttcatgaataccagcaatatcatttgacatcgcagctgcctttttggaaatttttgcattagaaagtcgtctttgaatttctttattatcattaccacctccaccaaatgtaaactgtctaaataatttattagcagattttttggcttgattaggtgctgaggatgatatcgatgcggatgaggaagtagaaggtctctcagtatctttctttattagcacaggtggaggatgtataatttttgattcaacatcttgtcctaatttatctgcttgatgtgttaatattttacctaaattgaacccttcatcatgattatcattacccttctcaatatcatttggagtgtctctagtgacagttctagaaattgctcttaataatttagaactgactttttctttttctggatcatatggattactaacataatcaccatccacttcatcatcaatattattatcactattatcacctgtgtatatacttatattattatcttcgtttaaatattcattattttcattacttgaagccacggaactttctgaactttctgaatttcttaaattattttcaccatctaccaaattatctaaattattagcaggtgtatcagcatcactttcaggcatatatgcagatgcaattgttctttctctcattaatggttgacccatatcaacaactgggaatacaccctttggagatctaatttgtttacttgaatgtctagaatttcttgatctaattgaagcagcagttgaaactcttgttacatgaggattaagagctgttgaattaactgtattagttcttgatatatcgttttcatcatctggtacaaattcctttactgttaaatcagatgatgacttttgtgattctgataatgatggagcagctgtcggaacacgaacaacacgtgattccatattaagcattggttgttcatctctttcttcataagctggtaactttaatttcttcatgtctttttcaataatatgcaggtgcaaataccatggtataacaattccaaaaaatgaaccaccaatcatattaccaattgagccaggtaacataatcttccaaaaataatgaccgaatccgtaaccacaaccagtaaaaatagcagctggaaccataaacatatcagccaccgaatgtgtgaaacccatagcaacgaacgtaaaaatagggaagaagatcataagaaatttgacatgtaaaggtttaaccataatttgtaaataaacagcaagacaaacaaaaaagttaccagcaatacccttcaacaaagtttcagcaaatgaataactattcttggaatggccaattgctattgttgcaataacataattttcttgtttgaaaataccagaacagtaacagaaaacatagacaacaaatattgtagctgcaaggttaacccaaaatgaaacaaaccaagaaattaataagtccatcagtgtaacagcaccacgcataacaccaacagagaaaaacaatatattagaattgaacaattccataccacaaacaataacataaaacaaccccaatgcatagactgcaccctgtgttaaataaacaaaaatatacgaaccagggattaatgcttgtccaccagcttcacacatcacatacaacataccgcctgcactaaaaagaaatgcacctattatggaatttatacataaaatataaaacggtagtcttgatttcttcattgatgtggccactacagccaatgctgcttcatgtggtgtgatatagtaagtatcatcaaccatatcataaacttataattcgatattctgtgtgtatttcaggtgtgtattttaagataaaaaataaaaatagataatgttgttcaataaagtatatgttgaataaattttccaaatattcttggcaattctgtttcgtcaattaatgacctgataattaattatgagacccctaaatgaagaatcgaagtaaaagaatggagaaaatgatataaataaatagaaggaagttatggccaaagaaggaaatcaaaataaaaaaatctgaaattttgagatccttcacagttcccgctcggaatccccacaaagtccgattggctgattgaatgaatcatcatatatctgaattttagaaaaaatgtacaagtatacacagtaaaaggattacataccaaggagaacactgaacaccgtagtgaagatacagttaacagggaaaatccaagtttccggtaataatgtaaaacaacataaactgacaaagggccaaatcatccatgataatttcatgtatttccataaaacttttgaatagttatctatgaaggagtcccaagtaagttcaatattagcattagtagtgaaatcaacactattaagcgattcaatctcccaatcccataaacaaatgaaaagtgaatatagcgtttgaaatattattgttccaattgtttgatctaataaaacacaagctaatttcatatttggaaataaattaacaacaaattcaatccagtaactactcaacaatccattcaaaccaccccaaatcatgaatttcaaatgttctttcaaattttcatcttgaatatggggagattcattattaatctcactaatactcaaagatggtgttaatttaggtgaaaacaatttatcaacgttacttgtgtttctactatgcatattaccactcttcatttgagaaatattaagattaatattatcactattacttaaacccaatatactattctcttcatcatttgccctatatttactattttgaaatgaacgtggatttttataacatttatagagtaatatcaacgttttaccaagtaatgaagtttcactacccataacaattggtgttaaaaacttattcttcttatcaaaatattgataatgtgaataagttaagaaaatgaaaaataattcaattcctaaaagataatataatatttcattatgtgagtcaaagaatgaacttaatgtatcaccactgcttgttctcttattttcattattcaagtaattctctcgttgtttattcagtacttcctgtttttcaatatctctgctattggtattagattcgtcagtaatttttatatcaacaccagcagagttattattatctaaaacttcataattttctaatccattggtattaatttgtatggtactcgtatttacctttgtatcactactagcgttcattaatccaaattacacgtcaaaagaaaacaaattccatcaatcgtgttcacaacaattggaagaccattatcgaaaaattaagttgttcgatcgtgtgcggcgatcccatcgaattaatttgacttctttactttattgctattatttaattgctatgtgtatcttattattattataaacaaggtttaaatatttttagtaatgtattaaattaaactaaattatataaaaacaaaaaacaaaaacaaaaggtaaatacaaaataaattcaaattcaaaattccttacaacaagcataataacaacatcaagttatttgctattaaacactttataaactaaaccagccttatgttttgagggggtataatatctccaattcttattattgactaatggtataaataatacaacattcaatgtatgtgtatctaattttaatttcttcttcttaatgtctaatttttattcattctctactattgacacagtgtagtaatactatattttaataaaacaatttcttatagtttctaaatttttttaattctttatgatctttaacgattctattttttcatctaacaaataccacctttcttagacatccaaattctaatcttgtagattctaaataattctttgactaaatctctaaaatctattctaatttctgaattataataaaatgttaattttttcatatcccattgatattctgcatcaacaatagccatatttaaaccaaattctctaactttatgttgacaaacttcaacagctctcatttcatcttcaattttagaatcaactgttaataattcttcattttgtgctagtcttaaaattggtttagggaaatttaaaattggctttttatgatcatcatcctttgatagtgcagcttttctacctaaatattgggcatatcttaataatcttgtttctaaaattgatacatttagtttaacaactttacctaaatctctaccacgatctgcttcaacaattactaaatcaccaatttttaaatttggaaaaaattgtaatttatctgattgattaatatagaaaacatcaattcttgaatttttaaaacaacatgcaattatttcataatcatttgatagaactaaatccgatggaattgttaattgtggtaatgatgtattatttaaataacttaaataactttcaatattcaacgattcagcacttggaaagcctaaatatgttgaaacttgggtcataaaatgaactaattgttcattagtaagagcaggagtattaggaatattattcatacccatgccaaaatttattcccataccaagaccaagaccatatgaattatcaagtgaactgtttcttgaatacatgttataactatcactttttctgtaattatttgattggttgtaattatcataattatgattataattgtagttataattatatccattgtttgaaactgaaatatctgatggttttaggttattagtgacaggattattaacatggttattagtgatattaccaaaattcattttcatattattgatattattcaagttatttaaagttttatcatctaaattattccaattaattggattgaggaaatcattaattgtatcaccagaatgtggaacaaaggtagcagcagttgttgcatcatatgaaaatcttctaaaatgtgaattatttttattaatattagcattatcattagtaggagagaaagttgtttcatttggaacagtttttggaggtttaccaaataaatctttattatcattccaaatatcatcaaagacagatttagttctaactttaccttcagattctgaacttaaacttgcattattaattgattgagaagtaatttcatcgatatttgaaaggaaaccattagaatttgaactatgatgacttaatcttgaaggtgaagcattatgggtatattcatttgagattggtgatgttaaactttcttgagataatggtgggatatttaagtaattttgtaatgaagcatcaatagtattgttaatagtattaatattattaatattattaatattggtattaatatgatttggtaaagttgaattaaaatcagaaaaaatatgcttttgaggagttaatggagaaataccaccatcaaaaccatctaaaccattagataatgataacattaaagaagatgatgttaaaggtggttgaatagcatcattaatattaatattagtattaacattagtatataatggttgtttaaaatcaaaagcagttaaaaattgaggtgatttatgatgatcatttgaatttgataatgaaccaagtttactatttgcatcaaatgaacttctttgatggaaattcatatcagttaaatcattataatttgtattaattgaaccaatacttgatcttttaacagttgaatatttttgagcatttatattagttgcggggaaaggaacaaaagaaccttcagatgataatcttgatctttcatccatttctaaggcagcttgcagagtttcctcttcaaaattagtagagaataaaccttttgtttgggtattattgttggtattgttggtatttaaatttggtttatcatcagacaatgacatattagccacagcagcagcagccgctgcaacagaatttgaatttgaatttgtgacaggcgtttcggagttgccggagcctgaattaacaataccgattgaattattattaggattcttattaagcagcatggtgattaagaagaactagtggagtataatattaaagcaaatgacttaatatgtcaaaataaaataaaaaatttaaattaatttgatataatatataatatgataataatataattttaatctgagatgagccccgatggggaggagaggaaagcaaaggaaaccgataaattggaaaacttggaaaggatggaaccaactgctctttaaatagtcaaaaagtaattacagtacagtacagtatagatagatatgtgtgattgtgtttgatgagtattgatcagattaaacaacagaatatacatagaaagacaagcacagtataagatgaaatgaatgaatgatggcaaagcagaacaaaagaaatcgccctccgcaaaacaggaagtcatcacctatggtttggtattacgtaatgatatttattatactgggggctggtcttcttatcttttatcttttatcttaatctttagtttataactactatataacaaaactacccaatcctaccagtattaaattacccagtaggatattattaaagagaatttcaaacccacttcttctagaatacatatcaataagatgtgtctgtatctcttccttatataccaataataatgccaatacttcaactatactactatcaataaatttatttgtattgacaaaacttttcatcagtttctcatcacaatttgcatcaggtttagccatacttgtaaaacttaataatgatggtaaatcaaggtattcaaaatcatttaaattttgtataattctaaattttatagctggtaaacttcttttatcatcattattaccattagtaaaatatccatcattatcttcatcatgtaattcttcatgatccttttcatgataattattatcaactctattgatattaccatcattactatttgtattcgcattcgtactaccattttcaccattttcaatttctgatccatcaaatggattctccctactatctatttcaggtgtttgaataaatctatttgatgaaagaccaaatttttcatcatttataaatgtaacaagtgattgtaaatcttgtgatgaaatatacggtaatcctgttaaacttgatttaggtacttcatgaggaaatcttgcacttaaatcaaaataattaattttcatatctatgacaacatatttattttgttcaaattttttatcaatttcttcataatcataattatcagttaatttcttataaattgtatcaaaagttcttttaaatccatcaatagaaaattgaaaatcaaattctttactcaatccattgactttaccactaaagtcagttctattattatcatcatcatttggtaacattatatcaaaaataacttccgctttacctgattcaatccaattaagtttggaattttcattatttaagaatgataaatcaagcatatcaattctaattcttgtcatttttttccaaatatcatctccacttccattaccattaccataattatcattatcatctaatctattatcatcgttcattaatttgctattagagttcatctccatagcaggggtattttcattcatattcatatttttgtttcctttattgtctctataattgtctaattcatttccattatcaatcaataaatctttattttcaattcctttagatattttattgattttatttaaattactattattaaaatcatcgctctcatcattgaaatccattccattaaaatgtgcaaatctatgttgtcttttatgtaatgtaaataatgaaccaccaagtgatccaaacatcgaattagcatttaaaaaatcataaaccatccattttcttcttaatctatctaaatcacaattaaagatatctaactctaatggttgattaaaatatttatcattatgaaatgtaatttgtgaatgtttaactttaagatgatttaattcataattatcactaaatgagttatctaataataattcttcaccatctaacatcataatatcaccatttaatccatagatttcaattccttcaattaatcccttaccatctaaccatttactaaatgaaaaagttaaatcaatttcagaaattgttaatttgtattcagaaaatgcatttttcgtaattgaattatcatttttattactatgattattatcaactttagaatttaaatttgaataaactttcaaatttcttatcttaatcttaccatcttcccaactagctttaaatctaggatcattaaaatccacaactaatttattatcaaatgtaattaattttttcaatattctcttctcaatttcacgatctccaatccaattaacaatataaatcaaaaatccgaaaaatgttgtagtaccaattaatatccataaaacattacccatcaagatccatgacaggaatgctgtaacttcatcaatattgaaaggtctattctgttttaataaaaaatatcttaatttagcacctatacctactggtgacgtattctctttactatgttctttatcaattttattgaaatcttcaccacccggtttattcaactgtgagtaatttctagcctgaaaggtgtatggtttaacacccatagtgttaatcatcaaacctcttttctttaataggtctaatgaattaaaatgatgttctttattaaaattcaccattgccagtcctctttttggataaactgtattcacctttttaaaagatgatattcctaatcggaacagtttcatatttttaaaaatatatggcaacatcttcaccatgtaatttattaacctatatgtctaactcaaagcaatacctatacttattatataattaatctatctaactaaacaaataaatataaaaagaacctcttataaaaaacgttttaatagtttgacactgaaaatttttcaaactccctccctcacttccccaggctttatcaactcagtttttcccatgaaatttcacagtttcccgcccggggtaatcataaaatgattcaatttcatcgattattattacagtcatgcttcatcaaggtctttatgtccaatatctgtatccttttcatctttaagtaggaaatctggactctttaaatcaacccatcctaaattaggtgcactactaacatatcctaatctttgttgaactaatttactataagttttaacttgatcaacagtatatgttaaccaaggaacttcttcttgtctataaacaccaggacattgaaataaaatatgcattggacgaattgtatcagaataattatttgcaccacaatgatataaactacctaataatataactgcatcacctttttctaattctgcactaattaattcatccctatatggaggtctttcatcaccccaaaggtgagatcccggtataacttgagttgcagcattttcaacagttgttttacatgttggaaccattaatccaactaaaacatcattacccataacatattcatttgatttaacatgtgttgcatgatgatttttatcatctctatgaattctctgtgccttggcatttggtccaattgccattgtcattgccattgataataatggatatgttgtataaacagttggtttatcatcataataattagttgtagttctattgaggaaatattcacttacttcttgataaattggatgagagaagaacttttcacgtacaattttagatcttgcaagtaatctaaaacatctctttgtttcaggtgggaataatttaccttcccatggtttatcgttgtctaaatatggttgaacttcttttagtgaattatctaagtcttcgtaacttgcgaaattcttcacaataactaaaccatcttttttcaaagctgtaataaagctatctatcggttctgtaacatctattctctcaaccatttttttggttaatagaaatgttaagaagatattctgaagatgaaaaataaacatactcttacatgttacctttatcttaccttatcttatcgtattgaaattttatgcgagataagccggttaattcactgggtacattatctgaccttttgattacctacacggggagtttgcgatcaaatcaacttacagcagatcataatgaaagattatttacaaaaattagaagataaaatactgtttcttgaataccaatattttaggtagtaaaaaggtacaatcaaagacccaagtatgtaattatcagtatacatgaaaaaccatgtattttaatcactagattcattatgttcatctagaatgtattattaggtcatatacattgatatgtatactgatgtaaaactgtaagagctataccaagataaatcaatcattaagcaagcttaataaattttatcaatttataattgtcagcatggaaaaaaatcatgatcgctaattaatgatctaacagtatcagacgccaattttcttactccttgtcagctacttacacagacaacaaatgctcaatcatgcaaggataaggaaaggtgttatactgacattatgcgtgctgatagtattggcactattgaataatatctattcttcaattaaaggtaataatattttcagcagtaatagtgataataatagtaataaaaatcaaggtaacaaaaaatccaagggtgcaagtgatttatttgggttaggaagaaatgagaaagatgaaatattacagcaattagataaattatccaatatattagttgagcaacaagagaaacgattaattcagttagagagagataatgataatcttgagaaacaaataaaggaattaaagaaaccatcaccaaattcatcattaagagaaagacttgcatatgtttatccatatgatttaaatgaaaaattcccagcttatatatggcaaacatggaaatatggattaaatgatgatagatttggaattgattataaaaaaggtgaagaacaatgggctatattgaatccaaaatttattcatgatatattcaatgatgatacggctaatgcaattatcagacatttatatgttaatttaccagaagttattaaagcatatgaatcactaccgcatttattattaaagattgattttttcaaatatttgatattatttgctaaaggtggtgtttatgcagatattgatacagtaccaatacaacctgtacctaattggatacctgaaaatgtcgatagtaatgaaattggtatgattattggaattgaaagtgatccaaaggttggattaaattggaaaaaatattatgcacgtagattacaattttccaattgggttatacaagctaaacctggacatccaatattaagagaagttattgcaacaattacagagattacattaacaaacatgaaaccgggtactttcaaaatgccgagggaaacagagatggaatttttaactgaagttatgaattggacaggtgatggaacttggactgatgttatttttagatattttaatgattatgtgttaagtggtatattctctaaagttacatggaaagattttactaaaatggaagtacctaaattagttagtgatgtattagtattacctgcattctcattcaatgcagtagagagtgaagaggaaaagacagtggaacaagtacacttaaagaataattttccacctaatcatgtaattaaggatgacacacatccattagcatttgttagacattttagagatagtttgtttatgagtaaggatacagtacttcaagatgaaataaagaattgagtctctgtctttaacttttttttactatattcctacttatataatacttataatacttattattatatttaatcaacaaccgttaaattccagtataattcaattaaactttaaaactaaaagaaatgaatgttgagccccccctactggaaccccatcttcactagccgcaattgtatacgcatcgccgcacagacgcggtggctggttaaaaagccgcttaatcggaaaagatggctgtgtttgtgttttacccttttcggaaggcacgcggtcgcggacgcggtttttctgctggcagtgaatggaaatttctcgtctgaaacactaacgagacgtatttttttctttttatagatttgatgtttttttttatcttatttgctatttgaaatttcttgtttattgtctcttttcaatttcctgctttaccccctggttgtttaatttactcgagttaccttcactctttattattgtattctttcctttatttcagtttttttatctcctattaatccttttttaactccttcctagtaataaacaaagctttcaaaagtatatctacttaccaaccgacctactaacccaagtctttccttcatttattcgattggtcctatttatacaaaacaacaacaaccactctttattattaaaattattccaaataacaaactaaaaaaattaaataattaaaatatcaagttaaattacctatgaaattctctacttcaattctttacaccattgcaactgctttggtttcaacttcatctgttgcagcagattgtcaatatgttggtggtaactattattgtaattcagttgatgcaattaaatatacaggtattggttttgcaggttcatatcaagatgttaataatatggacgaatcatcatgtcaatgttcttcaaatgctcttgctttctctggtactatgtctccattagatgaagaattatcaatccattttagaggtccacttaaattagcacaatttggtgtttattatccagcttcatcaaatgcaaagagagatgttcaagatgatgaagattgtacaacaactcaacatgttcatcataaacataagagagctcctgctattgaatatacttatgttacacaaactgttttccatgatgctgatggtaatgtcattacttcatctgttcaaactcaaaatccaggtcctgcaaatgctgatacaactttagcaactgttgttaataatgcccaaactacttcatcaagtgaacaaccaactacaactgctgttgcaactattgcttcagctgttacatctgctgctgctgcatcatcagatgcagcaactggtgattgggttagatcatcctatttctccccaggttctgcagataatcttgtctttatgaataatatgggtggtactgcaggttcaggtacatggtcatcatgttttggtaactctatctcattctgtgattctgatggtgtttcaggtgctgcatcacctcaagctttaggtgatgttacaattgcttcaaataaagaatttatgatcttttcaggttcaaaatgttcaacttcatcagctgatggtgattgtggttattatagagatggtattccagcttatcatggttttgcaggtgctaataaaatttttgtttttgaatttcaaatgcctcaagcaactgatagtgaaactttcaattacgatatgccagctatttggttattaaatgctaaaattccaagaactttacaatacggtaactcagcatgttcttgttggtcaactggttgtggtgaatttgatgtttttgaaattttatcatctggttcagataaattaatcagtcatttacatgatggtcaaggtgctccatcagcttcatcttatggtggtactggttctgctgactattttgatagaccttatgactctacaatgaaggctgcagttgttttcaaagatggtgaaatctcaattgtcgttcttgatgattcaacttcattcgattcttcattatcaagttcttctgttgattcctggttatctcagagtgcatcaattgcagctctttagatgaaccacattaaagtttttcaaacaaaagttctaataatcaataacaattacaaaatttttctttttctacctacaatgttctttatttttctttcttgtcttgtatttttcccatagtgtgctttttattcattttccatattgtatagttactacagtttataaccttcaactaaattacttaaaaaataattcgtgtattgcctcctatcttttattagatgagtaactacattataataaaactgttatctgtcagcttgtaccttaaattaatttttaaacactttagatttgatattagagctcctcaaaaacattatttacaatgcttttatttacttaaaatgtttttttaattcatgtatttgtgtccttaatcaactcttaagatagggcataaaatgggcctgctctttttatgccgagtacaagggcttgataagagatataaattttgtgtgattgttaaatttatgcattaattcattctttctcttattcacacttaattaataatttacattactttcatatagttgaaagataatataattttaaaagaaaccaataattttttaaaggaatactccaatacggtcaatataaaagattaagtttcacattattaaattaacatcgaaaaaaacgtttttttctgcattactataatcccaaacaggtacgtcgtttcttttttttcctgctatcatcatattatgaataattttaccagagttcataacatggaccaaagtgggtactttaatgatccaaatacccaaaatataaactacacacaaggctatccacagcaatatagccaagattataatcctaatatatcagaaggtacaaagcaaaacttccctcaaaacagggaattctcacgttcccccaactttcttgtaaatgatacccaaaatatggggggacatcaaatagaagctgatgatgatgatgaagaagaggaatctaaatctgatcctgactccgatgagaattttattgaaactgctacaagtgatatccagcataatagtctcccagtatatcatcataatcaacatggaaataatccaagtatgagtcaacatcattcaaatgtggagtatataacaaccacaccgaatgttcaacaccaacatcgacaatttaaaactctgggtatattatcaacttcaactacatcatctaaaccatacccacactttttatgtgatggttgtcagaaaataagtgatacatgctatttttgctttcaaaaagaacctaattttaaaagaaaagtaaaccaatttgagttatataatcaaccaaataaagttaatataaatgatgttgtaagaaactgtgataaaaattatatctatgaagaaaatgttgataatgtggataaaatttacgatccatacatcacaagatgtaaaattgatgatgatatagtaaatggtaggaaagttaaaaaagatcatccaggtttttgtcggtattgtctcttaatggatgattggaatgaaaatttttacgaaaggaataattcaagatatagaggtcatatgattaatacacatggtattcaccccaatggtagtagagttaaattacctgcaaatggaatatactgttataaatggataagaaatcactggtttgaaacaagtggcttttattgtccttatgatggttgtcttgaaacttttacaattggtgaaaaaggacatgggtttcatgaataccttcgtcattggagtaagaaacatgcttagtacagcaaaaaaataatttcatctgctacctctctgttaaataaaatattctctcctatcccctttttttattggaagctattgcccttttacctgtgtttacttctttttaatttgccacttaaccccatttatttgtacttttaatatttctatagtcttttcttttgatatctgtgactgattgctcaacataggtatccaactcaagctttgtcaataatataattaccggtgtcccgaaacaaaggactttttttgatagaagcgtatattataacgtacatttgagaaaaattacttcatcaaagcctgtattgccaaactcaaagtcaaagttaaagaatactcaaatagccgagctttccattgaagtgagatttaaataatgtctagcttctttcgagattcaaacttatttgctcccctgaataataaaccattattcaaaagtatttcaagtaataataatgatgggaaaagcaaaattttatcaaatgagcattggaaattaaatgataagaaatcaccgaaagattttttgaataaaaagtacgtttttggtaaaaataataagcaaaacaatagcgatgaggaatatgatgccgatgtaaatgataataaagagaatgaagatgaagatgatgttcaaaatgataataataaaagcattgatacaaatgattatgatgtaagtgattgtgtttatgaggaaactgctaacacttctaataacggtgatgatggggatgaggatgaaattaaaattactgaagtaagaagtctttctgttgttcatgacagtaagaaagtggatgaaaatgatggtgaccaacctaacacttcaaatacttttaataattccgttgatgatcaagattttaataatcgcaatagcaaaaatattgggagcaaccacgatatcacaaaatcagatttttcaaaaactgtaaccaaagtgaataatgagcagtctgattcaatttctattaattatttgttaaacacaatttctcatttaagtgaaacaaataaagaacttgaaaagcaaatcattgatttaaagattgaaaatgaaaaagtcaccttgagtgcagagaaaaaaaaagagtcaatttctgctttgaaacatcatttgtcaaaatttaaaactattctcacaaataataatgatgaaatgattgaaatgaaatcaatgatgagtgaacttcaaagcaaaaatagtaatttatcattagatttaaataatacaaagaaaaatattttaaaagagaatgagcttcttctatctttgaaaacaatagtctctaatatgaaatctcaaattgtctcaaatgaagcattgattgctcaaaaaaatgaaaagattgaaaatttaaagaaaagagtagatgaatttgccggaagattatcagaggaaaaaataagaaatatagatctaaataagaaattgacggagtcatctcaaaaatatgaatccgaaatgttcaaccttattaaagctaacaatgaaaaaacgcaagagatattagataaagaagaaaatttccaaaaggagttgaataaatcaacaatgtttgtaacacacctggctttttctttattcatttgaacaaatcttgaactattatactaacattcacttacattgtttttttaaagggagctcaaagatactttttctacacttattgttgaaaatacagcaaattttaacacattgaaagcaaatgtagaagataattttactgatattgccgtaagagtgacaagtttaggtagctcaaatgattcaattaaaacatgtatatctgatgctaatgcaaaatctctccactataaagatgaaatcatatctgctttgtccgctgttgataaaaatattatagaacaacttagcttgacacttaattcaatacttgcaaaggttaattcaacatgctctgaagaaatattacaagcagaaattacaaaagttgttggtattattcaagaatcattatgtaacgaaaagctcatcatgaagttacaacaagaaaataaacaagtagtttctaaaaagcaagaattagagaaaaagcaaggcgttttaaatagtgagttgaaggcaaaaaataatgaagttaaaaatcttaacaaagagatcaagacattatctgcagaaaatagcaaactgatgagcaacaatttatctattataagtgagcttgaattagaaaaagaaaagttaaaagaaacatatgagaaagagaaagctgttaatgctggaatggctatcgcacataaagaagaagttaaaaagctgaatgaagagaaacggaaatttgaagaaaaaagtgacaaaatgtttaatgatgaaaagaaagctgttgctaatttaaaaagctctattgatacatgcaacaaaaggattgctgaattagagaaagagaaggtgcagttaactaaagaaatagcttccaaaaacaaaaaggaggagagcttgattgccaaattacattccttagaggaaaaaatcagtgaagaatccgtaaaacaaactgacactgtgaagaaaatttcagcaactactgcctcaatgaaaaagtatgagttgcaattgaaggattataaaactagcatggaagagcaaaaattaaagattgaggagtaccaagaggatatttcaaagttgactcaaagagttcaaaataaagataaagatattgaacatctcaaagcaaccattgaagaaataaagaagaatcaagagataaaagtacaaaaaataaagcaggaaaacatttcaaatattttctcaaactctagaactagtactacaatcaagcaagaaaagattgcagcagcagcagcagctgtgaaaaaagttgctaagaagacgccacccaaaaaaccttcaaaaaagactggaaaagttgctaaatcaaaaaatgatgatgacgatgatgatttcattgacaaaaaagatattgctagtaaagaaaaagagccggtggaggataaattaaaatctcgtggtaggagtaaacgaaaaataaacgatgatcctttagcaattacacaaactaagagaaaacttatcagttcttcgcaatctacatcagccaagtccacacaacaaaactccaaattgaaaaatggctatgaaaacaaaaatattttgcaagatttagatatttttaacgaatttgaagccattgatagaatgggtacaataggtaaacatggttggtgatttataaataaaatctttgcttttgtatattcagtttttgaaaagtttttgtcaatatttatatccttactatatatatcaaatttggtattaaaatatctcctaaaagatggttctaattactggtctatatttcttgacctaattcttccatcaactcttcatcatcaaatttatgcataaaaaccaccttcttataaccatcacgttcaacgtgtaacacgggtatatcgtatctgtaacaatcaaaccattctttattctcaggtaaacaaatatcaacatactctacatctttaatatttttacgcattttttcatctatattatccaatgcactctctaatacagtgtttgcttcgtaacataacatacattctggtttagtgaagaattttaatctagtgatagttgatttatcagtagtgtatgttctgttgatctgtataatacttgttatactgcttaatttggtttttaagcattgtacgggtattcgtatagctgttgcaaacattcttactgtgttatttcctagggttgtttggttttagtgtaatctattaaaaagaaacacattattaaccagtaaagtaatcaaaattttgacaatacaaaatcatgagatttaagaaatgggcggtgcaaaaaaggagcttgacagttttggcggttggtattgctatataagagatcaacttagtgttataactgttgtgatgcaaaagcttttaatcgttaatacatgtttaaatgatataaaataaaataaaatacaaagttaataaatataaaaaaactaataatagtcatagtaacaacgtttatctaccaaccaacgtaatcacgtccaacaattctaaaaactctaagcttaccagatttcattttgttaagtttgtatcttccctgttgaacaaccccatttgattgctcaataactttaatcttgttcttcactgtatcataattggtaataattgcaacatgtggtttatcgaatcctacttgatcaacgccatggttctcaaattctgcatggaccagaactaatatatcacctggtcggatttcttcatatgatttacaatcaccgttgttgttacggtaaacaacagcaccaaaagttttattagcaattggtaataatacattttttggtaaattcgagaaaatgaagctaatgaactctccatcaaatgacttgttcaaactcttaactgcagagttatatgctaaaggaccaaattttgtatattgatcaattaaaacatttgattcaggtttgaccttgtccttactttcatggaaaaataatattctttcaggatcacttgtatcatatgctaattccagtgtactgcatgcaaggtgaacatctaaaatatagtaaactaaataaatgacagttttttcgtttctctttttaatctcagtagtttcaacttcaaaataattttcagtatttctaagttgtggaggtaaagattcacttgtccaccataattcattgttgttagaaaccgcattacctgtaactggtgatgaggctgagctgtctaatgaagttctagtgagttgtcttacaacaggtggaattggaggagctatatcatttggaactggtgcgtgtgttggtggaggaggtggtggtggtggtggtgcatgatgtgaatgtactgatgctttacggtatattcctccagttgtaggaactggtggtgcaacagatgatggtatacttggtctacttgaaactgaggaatgacgagattctgcatttgcaattggaacatgtgcaggaattggactataaacttctgctgggatttgtggaacttgtgttggagttggtaatgttggaacagatcctggaattggtggaggtattgctgatattggagccggtggcaatgctgaggtagtggttggtggtggcattggtggtctctcagttggaggaatagtttctggcataggtggtggaattgatgatggaatgcttggagcatctgatatagatactggaatatttgttgatgttgctggtgggggtgttgtggctggaggaggtggaggaggaatacgcacttcagctatagtaggagcttttgtgtgagctaatggagctgtaatagagccaggaacaagaggtattggtggtgctggtgcattagttggtactggtggtgcagttgtagttggagttgtgacattaacggctggtgatgcaaaatgtgctctatatggatgagattccattgagggtgttttcagttcttcttccaattctggatttttctcattattatgggtattagtatcttgatattcttcatcatctgtagaatcgtttaaaatagaagattcaggtatttcagatggttggattgaggcaacatcttcatttacatcttcaataatttctttagcttcttcagtaggttcgtttgataaaactttctctggtaaaggcattcccataattggagcagctcctggtatactcattggaagtataggtattgcaactggtgcatctttaggttcttgaggtgtaggtttcttctctttctttgatttctttttctttgttttggaagatacaggtggagctgaaggcatcattcccatcatgcccatcatacccattcctcctgataatttagccattctctcagccaactttcttttacggagttcttcttcatcttcttcatcttcatcctcttcatcctcttcatcatcttcactttcttcctcatcctcatctttatcttcgttttcatctgcatcttgatctgtctcttcagcttcatttccttcttctttatcattttctgcaatctcgtcttcttgtgtgtaattatctagtatcgactcggttgcttcaggaactgggggagctatatgtgaaacagtgtcttcataatcatctaatgtgttacctgaaacaattgaagctggaatatcagagtcatgtgtttgagactcattaacattttgatgtttatatttctttctttcctccttccttttcagtgcagcttctaaagccttttgttcctcttcttgctgtttttgtaacaattgcatacgctcctttaatgtcattcttggagcttctacttcttcagcaaaactagtttcagatataatttcaccagaaacgacatccggttttctttcttcttttctttccttctttggagtacctagtgaaggtggaacataagatgatctgtgctctgcagtaatgaaagattttttaacatagctatcttccttaggaatactcattggaactaaaggattggagactgtattaaatgactgtaacttatttttgaagttttctggttcatgaataatgttagactcaatatctttgaaatcctgttcagtcggggagctctctgaaacggtttcggcagcttcttttggtgatttttcttcaatatatggttcaacttcatccttttctatttctggagtaacggttttaactggtgatggggtttctggaacaattggcgctgggggagcaggctctgaatatgcttcaacaaatcctctaggaaagtaaccactcaattgatttccggatgcatcctttttaaatcctagtaaccaatcatcatccacaatttcagtaacagtgattaaatcatcaactctaagaggtaaatcgtcacttgcattctccggatcaggatcatactgatatctagcaattgctgtataaggaactgacatttttagctaattgaaggataattacaaacaattcaagttctttagcaatcaaaaatgtaagttagtttgtgtttgttcagtagaacctgtttaaagtcagtaattgagcttgttctaggggtgtgatatcaacaattatcaatgtaaaagtggcgaaactgcaaccaatctccacaaaaacgattaggctcactatttcgcttttatcgaccccaaaaaaagattaaatgtcgacgcgacatgtaatttgtgttacctttagggcaacatgaattttagcttcatcttttgtaggacagtcctaaaagaacctgatatttttacataagtgatttatagcagcttttggagaattaccggcattatatagaatggatgatgatgaaaggcgtcctgcaaaacgtctgaaagtttcagaatcctttaaaactaatgatgggcccaaaaattcagtagttggttcgactgacacgaaaactactgagaaaagaattaaactgaaaaccaaaagagttggaggtggaaatgggattatgaatacgattgaaagagaagatttgaatagcaaaaagaaagcaatatcagttggtgagttgaaagcacttaaagagaataagaaaacgggattgtcatcgaaaatgcttacaagtgtcattgatctgaataatgaatctgacgtatctacaaatgcaggatcttcacctttcaaaataatcagatcaagtcaagaatttaacatagactcaccgttaaataacagaaaccccctggtagtgggaaatgatgaaagatccaatgcaattcatactccgatagcttttaaaactcgacctagttcagatgatggtatattttggattacaacacctcaatcaggtaatgacatgagtttagttttgaatgcaggtgatgtatcagtaaatatggaaactaaactgccgtcttctcctttaaaagataatcaaagagatgcatcacttacagagttaccagatactttgctggatccagaattgaagaatttgttaggtaaatatgacaaaatggttagaacaaaaactttagctggtaatggatccaattcccctacattgaatagggcaaattcagattccaaagcattaaacacactgcatcatggctcaaaaggaagtaaagcaagctcaacacagataatagcatcgaaaagtacattaaatgatagtgtcaaaaattctttacgaaaggtttcgggggataagagctcaactgaaaatgacaatttagatctttccagaatgttagtacaaatagcgactaagctaaaaacatccaatactaatgcagtagtagagtctaatgaagaacatagtgaaatggaaattaaaaaagaaccgaaaaaagatattgatgatgaaggatctgatgattttagtgatgatatagactttagtgaagttttaatgaatgctacacaagcggctcctgtaaaaccccaaaatacccaacctgtagtaatgagtgatgatagtttcagtgatgatgacgatgatgatttaatggacaaaatagagcttggattaacccaaaatcaactaaggccaacaggtagatcagttactgatcaaactgatgttgaggagtttggtaatgatggaatagaaactaacaaggtgatttccgaaatcaaagagatgaacataaattttaccaatacgataaatagatataaaggtatggttgttacaaatgaacttgaaaatatgaatgattccaacaataaaccatttcagttatatgatgaaaaggaaaatttagccaaatcagctatcaattattcaacttctaaaagatttcaaattaaagatattcatcaaggtattttcaaacgtgattcacaagcttataaacaatacgtattgaaatgtttaactcctgatgacacttatataaacatcatggttagagatcattggacttcattgaactttaaagttaatgatgtcattcatattatagcaacaaatgaaaatggtagatatcaactggtagataaagaccagaatcttttaatttggaatcctgatacacttatttctgctacaagaattgcagatgctgttggatgtaaaagaaaatccattattaatcaaaaatttgctggcccgggagtcgtgggactacccttaatattaggtaccatagttcattctttattccagcaatgcttaacatctaaaaggttagatgaggaatttgtttcagcagccatctctgaagaaattaatcttcacatatatgaaatttacatgattgataaaagtagtaaagatataaaaaatatggttttagaacatttcagttacattaaagattggatcaaagcttacattcctgatgagctcggtcaatataactatactcttgataaaagaaccgagtttaaggccacaaatgtgttgaacattgaagagaatattttatctccagtttttggaattagaggattgattgatgttgtgatagaggctcagatgaatgacaattcgaaacttgttgttccattagaaatcaaaacaggtcgtgaatatatttccaataaagcacaagtttccctgtatacattattggtaaagcaaagatataatgttgaatcattttatacaagtttagtttacaccaaattacagcaatgttatttaagtgccattaaacataatgatataaaacttttgattaatataagaaatgaactttctcaatatttagtatatgcagtgacagaaatgccaccaattcttgaacaatcatcatgtgaaagatgttttgttgtaaatcattgtatggtgttaaataaattaactgaagatggaactgctgaaaaaagtggaattgatcctcaaatatacaatgatctgacagatcaacttgacaatccattatataaaaaattctacacgcattgggatagattaattaccaaagaggaaggtttattgaaatttgccaaagctgatttatggcgcaaaccaagtgataatagagaaagtaatggtggtaattgtgtttctaatttaaaagtgatctcatgtgattataatcatgcaaatcaacaatacgtttacattttcaaaagggatgatccaaagaggttaccattaaatgctagtcaattagctatcagtgatagagttataataagtgatgaagaaggtaattttggcctagccacaggatttgttaaatcaatcaagccaacgacagttatcattacaacatccaataattggtcagatatggctgttaaattagatgggtttaatgaaacaaataatcaggtattcaagtcagtattaggtgatccaagtgaaatcaatacccggaacttatcattagctacgaaatcaaagttgtatagaattgataaggatttaatttctgttggtatggctacagctagacataatctactaaatttatttttaccgattaccggtgattataaaacacgtggactagttgttgatttaagaaaacctgaatttggtaaaccaaggtatgaatatgatacaaaaaattctacaatgaataaagatcaaattagagcaattgacaaagtttcacaaattgaagattatgccttaattttaggaatgcctggtactggtaaaactacagtcattgccacaataattgattgtatcgttaagaaaggcatgactgttttaattacatcgtatacacattcagctgttgataatatttgtgagaaactcatcagaaatgctgaagagagaggtgaagaactttcattattaagagttggtgcattatccaaaattagttcagtcgttcaaccatatgctatgaacggtaaagaatttgaggagaaagtgaaaagtaaaacagatttcgataaagcaattgattgtcagattgtggcaagtacatgtttaggtataagtgatgttttcttcactgatttgacaagatttgattattgtatagttgatgaagcatcacaagttgcattacctattgttttaggtcctatttcattttccgataaatttatactagttggagatcattatcaactaccaccacttgttattcaccctgaagctaaacaagatggattagatcaatcgttatttaaaatattaagtgaagcacatcctgaaagtgtttgtgaactaacttatcaatatagaatgtgttctgatattatgtcattatctaatgaattaatttatgatggacgtctcaaatgtggatctgagaaagtttctaatcaaatgttgaaaatgccattttttgaatcattaccaattagggatacctgtattaatgaaataattagacctgagagaagagttgtatttattgatgaagattatgttaaaaatattcatgaaattagctttggtgataagattgagaatccaggtgaagctaaattaattgcaattgtcattaaatcattagttttaagtggtgttagagaggaaaatattggagtgatgtcattctatagggcacaacttaaacattttttccaatatctgaatagatataaagatattgaaattttaacagcagatagatttcaaggacgtgataaggatgttattattatatcattagttagaagtgaagtattaggagatttattgaaagaatggagaagggttaatgttgcaatgacaagggctaagtgtaaattaatgatttttggtagtaagaaattattagagagtagtaaggaatttaaagagtttatggatttaatcaattgtaatggatggtgttattcattaaaggagagtgatgagaaggaaatggaagaagttgatttctttcaaaatgaatttaatctgccagtttcagattcacagaatagtattaacataagtagaaatacaacacagaataggattgattcacagagtaaagttattcaaaagagtaaaatcttaaaatctgttatggaagatatataataatcatactatataataataaataatcacattactttttattttttaaataattacgtttccaattccaatattcaatcagacgattacaggaatatgaagaataatcaaaatctattaaagagattttactttgaatacctgcccatattccccaatatagacctggtaaaccataatgtaatgcaacttcattaactaaatgattaagtaaattttcatcaatattattattaataattttttcaattgtatcattattataaggatttaaatttggatttgatgaatgaaatgcattaagataatatttacaccaatttttaacagttaaattttcataattaccatttgaattattataagtaaattgtggaattttcgatttatcacaatcaaaaccttgccattccataaaatgatttgctatatcaaaagctctaggtgctggcatcatatattcataatctataaattgtaaaggatttgaattaaaagattttaaattattagttatttcatctttgttttcggagatatctattgatttaggtattattatattacctgataataaatcattatgagagatgactttaactgatgttaaaccaatttcattttgaagccaattaatttcatttagtagtattgaagataatgatgtgttattgtctatattgttattattattatttgataaaatatctgaattttcaatacattgattaatcattgaaggtatatcaggtactttatctacccaatctcttaaaacagaccaaatatctatatctgaagaagaatttgtattaaattttaattttaatttatttaatgaatcattaattatatttatatcagctaatttatgtaaacaagctaattttgaagcaattagagggtataagagattatttgataattcatcaaatgataaacttctaccttcgatgaaaccataaactaaaccattaccaaatctagcatgaattggaggtgctaaatttttagaattaagtattaaatgagatacaaattcacgatctctatcaataattaaatcagtaccattaccataagttctaacaagtacagtttcagttatatttgaaattggattattataattacattcaagcagcatatttgtaataccaccagttaatttttttatatcaattgaattataatgattccaatgactaaatatactcatcattaaagatttaattttttcaatttgatttgaatcttcctctaatggtatataatgatcaggtaaataaattgcatgagatttataatttttcaataatttcataattggagtattttcatgaattgttgaattaatataattatcatttaaaatatttttaggtgaactttgatttgaatcaaatgatgaaactgttttattatctaaaaattgactataaataggataatttaatggagtattagctgtgttattattgaggagggtattattaatagtattatcattcaatataaaatttgaaccattatttgaatgagaataaggtaagaaatgtaaatcaccattagttaataaacaatatgatgatgaaggtgagggagagtctaaattgttgttattatcatttatattaagaggaattgaagattttatttgatcagtaggcattattatgattaattatgataaattatgattataattattattatgatttagttgactggaatattatataatatagtagtatagtttaaaaggcaaatactaagggaatgtggttaattaatagagtatataatagatgtttaaaaggaagcaaaagtcaaaaggaagttaaagaagttaaagaagtaaaagaacaaaagaaacgaaaagggagttgaaatgtgcatgtacgataaaatttacgagattaacgtggcttcctattatattatgagatattgattacagttactgtgtattcatgttgtctttatagtttgtatatgctatctactgtatattattggtacaaccactgtggctttgacccaattattgtctctaatgcaaaagataagataagattagagcaaaaagaagggttacaaagtgaatattacatgcctgctttcttccaatttgattataaaagctaatattaaaaaaaattaatgtataatcgacaactgcaggattcgaacctgcgcgggcaaagcccaaaagatttctaatctttctccttaaccactcggacaaattgcctatttactaaaatgtaagggaataaatacaagttgttcaataatatccacgtgaagattaggtaagctgattacgtaaagatgataagatggaaataggaattccgagatacggaggttcggagatgtcggagtaagaaaggaatgacttagattgaaattgaattaattatgataaggagtggtatgattgataaggaatagtttaattaactatattaaggaatggttaatattgtaatataaataagtatgatatcctgtataactttgtataactctcttctgagaggggacattaatcagagtattagttagagaacaatctactaattaataccaaccgtctcattgctactcgctgtctattacacaaataaaaggtccaacgagtaaacttagtttatacttattacttccattacgtaattaagtattatccactatcttacatattttagtttacatttggtagcaccggctagtgtttgtgttcctaattaaatcaaattatattcatctattaattaaattaaatcaactaaaaatgtcatctgctaaagataagattaatgctttaaagcaacaaattaaggaaataaaattaactgaaaagaagaagaagaaagaattatcaaagaaacattctaccaaacattcaaagaacgttattaaaaagaagaaacatattaaaccacctcttagaattatccattccgatcctgaaatgtctgattattcatttgatgatgctttttcctcagataattcccattctgataactccaattctgattctgatatttctgattccgatactgatactgatgatgataataaaacttctaaaaatgataaacttagttctaactttccaaaatttgatggttcttctactgatgataaaggcaaggaattctccactactgaagctcaacttaaagcaaaaacttggttatctaagttgcacgttaatttaattgataaaggtatttcaaaatcaagctgggctagaaaagctattgttaatctcgaaggtagagcatacaaatgggtagaacataaattagagaagaatccaaagtatttaaagatttcctgggaaagatttttacgtgatttcaaaaaagaattttgtcctgttattgaagatgatatgcatgctatggattacaagattctaacttttaaaatggttccaggaatgaaagtctctacatattctgatcaatttaaagaatatattcaagaattggattttgaagaatctactaaatttcaaatttcaagatatttacttggtttaacacctgaattgaaaaagatggtatcccaacaaaaacctcgtaccttgaatgctgctattcattatgcagaagattctgaagctattttgaatgatattgaagaagcaaaaccaaaaaatccttggatcaataatatcgaacatcaaactcctgttagacgctcttattctcgcccatatagagttaataaatataaacctggttatcataataagcaaagatttttcagaaacaaaagaccatttaaaaggtacaattcaaattttaccccaatcggtggtaatcgttccatgcatttttctcgtcctactaaactaaataataaactatctaataataataatactagttctttttcttatattgcacctccagtaagtattcaacccgaagttgatcatttaaatgtcgagaaggaagaaggtgatactgttgttaataattctcaaagggtgattccaagagatgagactattaagaagggtgattcctctgaagttaaattgttaaagggtgattccaaacaagaaacaaatagtccaactttaaacattccttcattacctgaaattttacatgttaatgctttgaatattgaaaatttacgaaaaatagatgtacaaattgataataaaaattccgcatcagcaattattgatactggatccaatacagatgctattactacaattttatgtgatgaactgttattatcaagcaagattagattatatgttgaaccaattagtgctattttagttaatgatactgttgatgctattggtgaactagatatagatattgatgttgatctatttaataatcctatcaaagaaaaaagaacatttttagttttgcaggcaaacaccaagaaattaattttaggacttccatttttcaaacaacattatgataagttagatatacatgattttattggagatagttttgcaacaccaagtgttaatgttaatttaattgaatatcatgatagacatatttctactattattaataataaagataatgattcatatctaatatatattaattcaatgaatgttgaatcctctgaagaaaatgatattaaaactattgataaagaaattaataatgttgaagttaataaatacagaaatgatattttagaaaaatttaatgatgttgttactatgaaagaaccaaatgaacttcctcctaaaagaaatcacgaacataaaattattttagttgaatctaataagcaagttaatagaaatcaatatcctttaagttattcagaaaaggaagaattaaccaaaactgttgataagttaatacaacaaaaatttattagaattagtgatagtccttataatagccctgttttatttgttaagaaaaaagatggaaccatgaggatgtgcattgattatagattgttgaataataacactgttaaagatagatttcctttacctcatatagaagaaattatttccaagtttgaatctgctgttgtttattccaaattagatttaatgtcaggttattatcaagtaagaatccaagaagaagatattccaaaaactgcttttagtactgattatggtcattatgaatgggttgttatgccttttggtcttactaatgctccagcaacttttcaacgtatgatgaatactatcttatccaaatatttgaatacatgtgtgcaagtttatttagatgatatttttatttattccaaatcttataagcaacattatgaagatattaaaagtgttttatctacattaagagaacatcatttaattgctaagaaatcaaagtgtgccttcttttacgatgaattaagatttttaggtcatgttattactaaaaatggaattaaaactgatccagataaaattgaaaaggttaaaaattggccaattccaactactgtcaaagaagctcaaatgtttataggtttaacttcatattatagacgttttatcaagaatcattctaagattgctgtaccaattcataaatttattaccaaagaatcaaaatgggaagatgaacaaactaatgcttttaatcaacttaaagacgctttaattaacagtcctattctagtacatccaaaatggaataatgattgtacttatgttgttcatactgatgcttgtggtagtgctttaggttatactttagaacaattagatgaaaatggtaaaacaagaggtacaattgcttatggttctaagaaattaataggagctcaattaaattatggtatttatgatagagaatttatggcagttgtagaagctttgaaaaattggagatattatttattaggtagacattttgttattgttactgatcataaaagtttaatttatctacgctatcaaaatttgattgattcaactagggttgcaagatggcttgattatttatcacaatatgattttgaaattcaaaatgttgcaggtaaagataattctgccgcagatgctttaagtcgttatccatatgaaaaattgtctgttaaagatgctttagaagttaatcatattaaatttttaggtaattcaaatagaaattcaaataataatattcaaattaataatactgaagttactgttactacttttcctatgaatgatgaattaaagaatttaattattaaaggttataaaaaagataatgtacttgctgatgtttattcaactttgaaaaataaatctgaaattcctattcatttaaaccaccatattaaacattatcaacttaaaaatgatttactttattataaaacattattagaacaagattgcaatagattagttattcctcgttataatagtttacctcaaagatttattaaaaatgctcataataatcctacttctggtcattttggtccttggaaaacttatcaaactttaatggattcattattttggtttaatatgatgcctacaattaaaaggtattgcaatagatgcattgtttgtcaacaaaataacacttctactcagaaaactcaaggattatttcaaccattacctgttcctgaaggtagatggactgatgttacaatggattttgttactggtttgccaacaactacttcaaatcatgatatgattatggttattactgatagattttcaaaaatgtcacattttattccaactgtgaaaactttaactgctgaaggttgtgctaaattatttttagattattttcttaaacatcatggatttccaaaaagattaactagtgataaagatattaggtttatgaataaattttggtatactattcattttttctttggtgtttctttattgttttcaactactaatcatccacaaactgatggtcaaactgaaagagttaataaagttttaaatcaattattaagaaaacattgttcaaatgatcatttacactgggatgaatttttaccaatgtgtgaatttgcttataatagtacttaccatgattcaattaaatgttctccttttgaattagctataggatataaaccagattctatgaaaagtgttaatagttggaatttagatgataatagatatagtccaaatgctcaagaatatgctagacgtatgagattaactttaactcaagctcaagataatattgtacaagctcaaagattgaatgaaaaatatcataatagatcacatagatttcataattataaagttggtgattatattttattgcatcgtgatgcttttggtgcttttgctaaatattataaaattcaacctgcttattatggtccatttagattggtgaaaaaaattaatgataatgcttttgaagttgatttacctaagattaataaaaaggatagagtattaaatattaaaaattttcgtccatatgttcctccagtcgatttattatgtcgtccacctagaactaatgctgaaattttatcaagaattaatcaaatgtgtggtattgctggttttgatgaagaaaagaatacttttgatgtttattggagagattgtgatcctttacttgctacaactattactgctgatcaatttaatacggcttcggaatcacttcgtcatagtttatttcataatgccaagatgatttgtgctcatgagcaaattgtttaagtatttgatttaatttaattttaacatcagggacgatgtttcccaacagccggggtaatgtaagggaataaatacaagttgttcaataatatccacgtgaagattaggtaagctgattacgtaaagatgataagatggaaataggaattccgagatacggaggttcggagatgtcggagtaagaaaggaatgacttagattgaaattgaattaattatgataaggagtggtatgattgataaggaatagtttaattaactatattaaggaatggttaatattgtaatataaataagtatgatatcctgtataactttgtataactctcttctgagaggggacattaatcagagtattagttagagaacaatctactaattaataccaaccgtctcattgctactcgctgtctattacacaaataaaaggtccaacgagtaaacttagtttatacttattacttccattacgtaattaagtattatccactatcttacatattttagtttacataaaaaagtattggctatgtttgtggtatggtgtactcatgttttaatgtcacgtgacatatgttaaaaagttatatttttgaatgtttcttaattttacactgttataaatagtgaagttttttgtgtaagataaaaacaataaattttagtcataatttttagtatttgtttattaaatattcacagtttgttaaaaaaaatcttacttgctatttagtcatttaaaaaattataaccaatagcaccactaacacttctacaaggtagaacaacaatgacaatacttcactattctatactcttattatactatactaccacacctaataacgcctcagtttatcttccccatatacataataatttcatcactaaaaaataacatcgcgcatcacttgaaatagtctaagctgcccttttaaacatttaataatcttgaaattagattataattataataatgctcatcagatcttttctgtttccttttaactcttcatgaattcttaattatcaatagcaatatgtcattctttaaatctccatttgcttcaaataatgcttcaactcatagtataaatacaaatcataacaataataataatagcaataataacactcatttaagttcagtaaattctacaacttcaattaatgatatacgaaataattataataacaacagtaatggtagtaacgatgttgtgtccttagctccaagtaaaaaatcattaacttatatactcaattcgaataatcatctggaatcatttaatgaaatgaaaggtcatcattgtatcggtgttaattcattaatttataataaatctgaaaaatctttaatatcaggtggtagagatggtcaaataagtatttggaaatttaataatgataattctaatgaaaatttcaattcaagtgaaatatttgataataaaattagatcaaataatgaaattagaaatcatataattaataatttaaataatgaaaatgaatttaaaaatttagaaaatagcataaatgatggaattaaatcattatcaattaataaatcaaattcaattccgaattattataaaagttcttaccttcatcattttggttggattaatgatatgaaattaataaatagtaatagtaataatacaaactcaattatagcctcttgttcaaatgatttatcaattaaattatggaattataataatgatcaaatatcagttttaggttatcatgatgattatattaaaaaaattggttataatgaaaattttagtgatcaattagtttctggtggtttagataaaattattaaaatttgggatattaataaacaaaaatcaatttcaaattataaattcaaagattttaataattcaatttattcacttgatgttaataataataatttaattatctgttcaggtccttcaaatataattacactttttgatagacgtgatttaaataaaccaataaaaaatttcttaggtcatactgataatgttagatctttaattttaaaggataattcatttttatcaggttcttccgatacaacaattaaattatgggatttacgtacaactagaattttacgtaattttgaaatgcataattcaccagtttggtcactttattcaccaacttattcaaataatgattttacaattttttattcagctgataaatcaggtttattattgaaaaatgatttaagatcctcaaatttaaattcaaatagtatcaatgatgattattttaaatttaaagttaatgaatctttaggtattagtacaatcattgcaaatgttaattttaacaataaattaaataatgagaatagtgattcaactactaataatacattatttgattcaggtattaatgatattgttgaaactgatgatttaggtatgatttggactgcaacttcaccaaatattcataattttgatactaattttataagtagttggacaatacctcaaactggtaagttggtaatgtatcaaggcttaatattaaataaaaaattaacaagtttatcagatgatacaaatgataataataataataataataataatgccactaatgatactaccactgatgatataataactaataatcttgaaaaatcaacaattaatgatgattatgaagatttagtaagtcaattaagtggtgatgatttagatcaaattgacaatgcattattttcaaattcaaatggtttagataacattttacatgaagggaatattgattttaataataatgaaaaattatcatcaatgtatctgctcggagatgatgaagagagtagtatcggagtttatgatgatagagtaaattatgataatgatgaagattttggattagctacatgtttccttaatacattgggtaatttaaatacacaatttttattatctgatgattgttttaatgaagatgaatcacaaacctcacaagaacttgatcctttcaataatactaaaaattctacaaacaataataatataatacagattaataggaaaattagactaaataatgaagatattgatgaaaatgatgtatttttattaccatataattttaaaccaattagtacaatatcaggtacaagtggattaattaagagtaaaatattaaatgataaaagacatgttgcagcaatggatcaaagtggatgtgtttatatatttgatattttacaaggtataatgattagaagagttgataataatttatcaattaatagtatagaaacaattgataaaaatttaagattgataaaacataaagaaaattataataatgaaataaatgaaattaatgaaaagtcattaaatttaatggatagatttgaagcagtttgtgaaaaatttcaaacaactgaatcattaccgtcatggtgttcagttcaagttaaatcaggtcaattatttattacattacaagaaaataattttacatcatgtgaaatttacaatgatgaatttaatgagtattatagtgttaacaataagaacaataacaataccaacaataatgacaatatatttagagttaatttgggcaagattatcattaaatcaattttccgtaattgtttggaaaatataattaatgaaagacatattaaattagggtctgatattggaacagttgaagaagaagttgattcatttcaaatgaataggaataaaaacaaatcaataaatgtagttgatgaaaaagctgaaaaggctgaaagaacaatgaaaataccacaaccaactccccaaataagggataatgataaggaaaaggaaaaagagaaaaaatctagaggattatttggtagattaaagggtaaggaacctaaaagggagattgagagaaacaatagtgataataataataataataaacttgagaattgtttagaaaagattcaacatattgataatagtgaagaattaattgaatatttatcaaagaataaaaatattttcaaaatattgaaaacacaggaaggatatagtgaaagagagagagataataagaatatgccaatttttcagtataatgatagtaatatattagttgttattaatgaagagactggacgtgaatctcgacctgcatatactgttacaattgataaattatcaaaagattatggaattaatcattttgaaatactgaaaaaattaccaatttggataactaaaggattattattacacatgtatccaataccatcctcaatgactaataagattgggttcactttatcaccatatattgaaactgacagggagagtaaattacctaagattgatgataatagtaatggaacagttggattaaaattaaatggtgttggatcattacgagttagtagaatatgtgaatttgtcaatgggaaattacctgagaatgttcgatcaaaggaattggagattatctgtcgtggtaaagtacttgacgagaaggatactttaggtaccgttaaggccagagtatggagacaaggtggtgatattgagttgttctacaggtagtaatagataaagtgtataattgtgtaagagacgatgggactgtgaggaactgaaaaattttctaagaaaaagaaaaaaatgagaaataagaaacttcaacatgaattgaataattttgattttgatgttgtgtatataggttttgtatttttttttattggatagggtaatagaatataatagagtagagtagtatggaggacgtcgacagaaccacatcacgtttatggagagcttatcgtacggtgaaggaaatggtatcagatcgtggatattttatttctaaggaggaattagaaatgtcattagagcaatttagagagaaaatgtgtgattcaatgggtatgccacaacgtaaattaatgtcatttcaagctaatccacttcaagaatcacttgaaaaatatggagatttaggaccattatgggttgaattttgtgatgaaccatcagttggtattcaaacaatgaaaaatttttgtgctcatataactgataaaaattttacaacaggtttatttatatatcaaaaaaatttaacaccaagtgcaacaaaggcaattgcagttgcagaacctgcaacaattgaaatttttcaagaaactgatattattgttaatattactcatcatgaattagttccaaaacatattagattaagtaatgaagaaaagaaagatttattaacaagatatagattaaaggagagtcaattaccaagaattcaaagtgaagatccagttgcaagatatttaggtttaaagagaggtcaagtagtgaaaattattagaagaagtgaaacttctggtagatatgcctcttatagaatttgtttataatatctatcaattgtatgtatgtattaattaattaactaactataataataaataactttttacttttacatttgcatttacatttacatttattttaattttgaacacataacagaatctgaaatacctttccaccatgtaacatttttaagtgataatggggttttaggtgaaactgatactccattttcacctaaaaacacaggtccaatagtaattatcaatgaatcaacaatatcagggcacaataatagatcatttataatatatgcaccaccttcaatcataaatttatgtaatctgaattgatcttcacattgattcaatatactttcccaagataatttaccatcaccgtcatttctccttattctaacaatatcacaattaaatctatcatcacttacttctatatcatcacttataactattacaggtttattaccattaccattaagataattttccactaatttatatttttcaaccttactttctttactaaatatctccattgatttaaatgttggatcaataattatcggtgttattctattaccttcaccatacctacaattaagtgatggattatctgctaataatgttccaatacctatcactaatgaatcatgaaatgatctaatataatgtgtcattgtctttgtctcttcatgtgatatatgagtacgtaatcctttaccagctgcaatctttgaatcaatactctgtgcataagttaaagttacatgtctacgtctatgtctatgattaaaactggatgatagatacggtttcaatactgggaataaggactcatcaataggatgtaatgacattgtatagtggtaatacgggagatagtggatataccagatcaaagaagaagaggctgtttatattattctatatttatataacggacatagcggtgaatcatgaaaattttcagtggaaattattttgacactttttgccaatctttccatttcttttcagtacttaaacaagagggtatcccatccgtataatagtaacaataatataatttctatcatgtctcatcgtcgtgtgttaactagtaatatgttgaaaaacgtaccacatcaaacaacttctacaacttcaaaattatcattacaatcatgtttaacatttaataatgttttccaacatcctgatataccaagatctcaacaaaggcgccagtttcataaatctcataataagaaaaataccactagatcaaccgccaccacttcatcatcatcatcttatgctgttaatgaatttaaaaatttaactaaaaatataccaaaatcttcattaccatattataaacaattacttgcatttgatgaatgtttagcacataattcatttttcgatcctaaaactggtgaagtacccggtggtacagttaaattttgggattcagttgaaaaaattatgccattatatgatgaattaattttaactggtgaattaaatcaaagaagaattgatgaattaatttcacttttaagaaatggtttaagaatgcatagatttgaattatctaaattaaagaaaaacattgatagagatttaaattcccctctccaacaaatgcaaaattatttacaaaattcacttattaagataagtaatgatataattaataaaaattttggtgatgatattaatataagttcaagaggtttaacaaatttatttaaagcatttactgacatgagattaattgatgaagcaacaattatttggaataaaggtaagaaagatcctaaattatttcaattatttacaagtgaatcagttttaggttcaattttaacattattaattgaaaataaagattttgattatgaagaaatttcaaatatttatgaaactattaaaaaaaataaacatggtaaagaaataattcatagtgaattacaagttgcaatgattagagcaagtttaattaaatgtcaaactactaaagcattaaatatttttaaagaaattacaactgatgtaattgaattttatagtaataaaaattcttcaccacctgttgcagttaaaaattatatgacaatggcacatttatcatttattggatattgtcaagattatgaaactgctaatatatttttcaatgattcatttaagaatgaaatgccatatttaacaccaattcaaattaattatgttaaaaaatttatgcaaaatacatggaataatacaaaagattttgataaagttacaaaaatttggcttttaacatggaattattttgaaattaataaaaaatcaacaactgcaatttcatcatcattaaatgatatttaccttgaaattttctttgaaaaatataatatatttaataatgaaagtgcaaataaattaaaagaaattttaactgattataataaaattaaatcaatggatgaaccattctttaattgtcttataactaaatcacaaaaatggtcaaatgttgatattttcagatcaattgttaaaatgggagatttatataatttccctaaaacaaatgtttatcatagatgtgtacttaaatcaagtggatcagttaatgaattatcaattgaagaaatttatcaatttttccaaagattaattcaatcaaatattcaattaggttgtaataatttaacaaatgcagattggtttgcatttagggatgcaacaattcattcaaaatttattaataatgataaaattaacttatattttaaattatttaaattaagttgtaaacatttcttaagtttacaaaattttaaactttacatgaatttagatattggattagatagaaggtataaaaatgtttatgatgaatttgatcgtgttgatgttagtgatattgaagtgatagaattacagtggtttaataagtgcagagccatagaggaatactggcaacaacgtggtgttgatatataatttacagattaacatataattttaaataaactattctttaataaaatatacctttaatttaatttaatgataaaacatgtttcttatagtgagaaatttaaaatttagtctttttactttaattattattagttatttatttctttttgataagtatattattattattataatacagacaacaatggatagatccaatgagtcttcgttgccaatgtctaatgaggggatatcggggattggtaatatatctaatttatcaagtatggatatgaacaatattaattcaatgaatatgagtagtataaataatttaagtggtattggtagtatgagtaatatgaataatattaatagtatgaataatagtataaataatatgaataatcttaatgggatgggaaatatgcatatgatgaataatatgaatcatacgaataatacgaataatatgaacaatatgaacaatatgaatttaggtatgaatatgggcatgggtttaaatatgaatatgaatatgatgaacaagttaaacaatttaaacaatttaaacaatcttaatggtatgaatttaaataatttgaataatatgacaatgaatcatttaaataatttaaacaatttaaatatgtcattaccatcaattcaagatttacaacctttaccaaagagaggtcgtggacgtccacgtaaatttacaattgaggaacgtccatcaagaccaaaattaccaccaatttatgataaagatggtaatataattaaacgtaaacgtggtagaccacgtaaatatccattacctgatccagatgaggcaaataaaccaaagagaggtcgtggtagaccacgtaaagaagtaattttaaatgatgaacaaagacgacaacaaaagcaagtagatgaagctgctgttaatgtttcaaatactgttacaagtacaaatgtagttgaatctgaaacaacatcaacattaacatcagaatctcaatcatcatcatctatattacgaggggtaacaccacctatacttgcacagtctactcaaaaagaaggccaagagaagatcaatgatagtaataaagatgatagtaaaaatactaccaaagatactaccggagataccatagaagacaccaatagtaacaattccaacacacttgctaaacaaactacatctgaacccattcaagatacacaaccatccaataatgggaagaaagacgatgagatgatactacatgtgaacaacttgtccaacatgacaatgcttaacaaagtaaactctaatgatctggccactctcatggattttacaacttgacccttcttcttcttcttcttcttttcatttcttttcatttctttgcttctttatctacactttatattgtattatactgtattgtactattttgtaatattcaatgggaaactgttcctcaactgatactgttaagagaccatcaaaagaagctaaacaagctaagccgaatacgcccactataagggtaacaaaaccaccaacagtacaaaaatctagtgccaataagaaaaacaaagcattccctaaggaaacacatcaattagcaactaatgatccatcaactacaacaactaacattaattcattaactccaacacaattagcagctcaggcagctgaagcaagatcaaagaataaaagataaatgtcttgattatgataattataactctctttaatttctatactgcatatagtttatatgtaggttatcaatactaatactaatatgatactaatatgatactaatactaatactaatactaatactaatataatactaatactaatactaatactataacataatactaatataataatacaatcaatcagatgactcaatacctatacttacaaatacatcacatatacaaaatcaaataagccatcaataagaccatactacattacaaatcaaaccaaatacctataatccaggccccaaagtgattacttatattaccttaattacttacaatgattctaagtgactcttataaaattaaaattaaaattgaagcgataacgaaattgaaaaattatttttttttaatttaaatataagccttttattaacctttttttattctaaacttttgcatgtatttcactaaacaaaatggaaaaggaagatatagacgaaggatctagattatatgaaccagatagtgattcatatgatgcatttgcacatgaaaatgatcaagtattcccagaaggtggttggagagcttggattacaattattggtacattatttggtttaatgacagttttcggtattatggatacaatggcttcaattcaactttatattacaaaacatcaattagctgatgttaaattaagttcagtttcatggattttctccctttatatgtttacaaatttagcacttggtattattgcaggtccaattttcgatatttatggtattaaaaaaattttattagttggtatcattttcaattgtggtggtttatatgcaactgcattttgtactgaattatggcattttgttttaagttttggtatttgtacaggtattggatcaggtttaatgttaactccattagttggtgttgttagtcactggtttttgaaaaaaagaggtttagcaaatggtgtttctgaatgtggttcaatttcaggtgttttcttcccaattatgcttagaagtttatatccttccttaggttataaaaaggcaatgattgttttagcttcaatttgtgttattttctcaattattgcatattttacagttcaagatagatgtgatgaattacataaagaatctttacatataccaaaaaagacaagattaattaaagcttataaaaatatggttaattttaaaaattttaaagaaaaaaattatttattccttgtactttcaatgttctttgatgaattttcaattattttagttattacatatattgcaacttatggtgcagctagagatatacctgaatcaacaacttatattattgttacagttatgaatgcatcaggtattttaggtaaagttataccagcatatttaagtgataaatttggtcgttttaatataatgttgttaattatgttaatattggttatttcattatttgcaatttggttaccattctataatttagcaggtttttacatttttgcaattgtttatggatttgcatttggtgcagtttacgcattaacacctgttttaattgcacaaatttctaaaacaaaggaatttggttcaagatatgcaatggcttattttattgttgcatttggtaatttaatttcaatgccaattggttcccaatttattaatgaagaaactgttcaaaattataatcatatgatcatatttgcaggttcaacttgtgtatttgcaactttcttattaattttaagtagatatgatatggttggttggaaaattaaaacttatgtttaagtttatgtatatgatgatgccggttcttagattttagattttagatttttactaatattctattctattctcttctcttttcttctttacagttctttacagttctttttaaactaatataatctaaatataatgattcatatacttaatataaatagattaatacatactcatcatgctaaactagctaaatcttcaatatcatttaaggaaacatccactcttatcgcccaatcaatgatccgcacgactaaccatgccctaattgcacattcatattgggaaaacctcaggaagaacaataaagataagaataacaactccgaatatagacaaataccagatgattcaagatttatggataaacattacaatgaattaattaattacagagataaaattgtcggagttggtggatcatttaatgatttaaatagtattacagaattattctttaaattaagtaaattatatccaaatgaaggtaaacctgaacaaattgaattatttaataaatttattgatgatttatggcaattattaatgttaaatggtggttatattgatatattagatttaatgatttataataagcaggtatttgatcattgcgaaagtacaaaacatcatgtttaattaattttttatactattacaatactttcttttatttctttatttatataaatataacacacacaatgccatttactataactaattggtcaattgatcgtaatcatttaggtcttaatagaataccattttataatattgcagttaaatggaaattatctgatttaatttacgttttcctaatttatgcccttgattggatttattttgaaaatattaaacctttccaacgtcaatttacaattaatgatataacaatttcacatccatttgcagaacatgaacgtgtacctggtgatgtattattaaaatggattacaattttcccatttataattataccaataatttcattattattaactccaagaccatttaaattatacattatttatttatcattattaggagttttcattagtatgggtacatgtattttcgttactgatgttttgaaaaattggattggtcgttgtagacctgatttcttagcaagatgtaaaccaatggataatttattacctgatacattatatcttgctaaagatgtttgtacaactaaagatattggtaaattattagatggatttagaacaactccatctggacattcatcaatgtcatggtcatcatttggttatatatcattatggttaaatggtcaattaaattgttcacatgttcatagaggtgcatggagatcaattgttgcatttttaccatgtttaattgcattttatgttgcattaagtagaactcaagattatagacatcattttattgatattatcttaggttcattaattggttcatttattgcttggtggagttatcgtagatatttcccaaaaattaattcaagaggttgttatataccttatgttttacttgaaaaagttggtagtttgaacaatgaaagtaaccaagctgctcatgattattataatgatgttcaattagcaatgggtacttatgtaccaactgcaactcaatcaaatgatggtaatgaacttgaccttgatcttgaaaattcaccaaattttatcttttaatagtgccacttatttaataattattcatctatttatataatacaaaataccataatatacaacccaatctgtacatcaaactatacattctctctagctatacgagcatttctttcacgatgaagtctagataattcacgttttttccataattctttatcttcaatttgatcagtatcatcaatttcttcacaaattatttcctcttcattaaataatgtagttttagttgatttaacatttgcaagattagaatttataattgataatgcaattttttcattaatgttactatcttgagtatcttttttactgatattaggtaaaggttttttaaaagttacatttcttttaaacccagaattagaatcagattcagaacttgaacttgaacctgactccgagtccgaactaccagaaccagaggaactcattgcattgtcctttaaggagaagcatcagattaaagagagtgtctattttaaggctgtgagaagtgaaattttgattttcaataaattttttttacatgaaattttttttttcactaagttttatatcttttctatattcagcaactacttcattataacaaacaatgtcagcaatttataaggcaattagtggaggtaagaagaagactgataattctatttctaaaccagaagataataaacgtatcaatagacagagagttttacttatttcatcaagaggtataacgtatcgtcatagacatttaatatctgatttacaatcattattaccacatgcaagaaaggaaccaaaattagatacaaagaagacattatatgaattaaatgaaattgcagaattatacaattgtaataatataatgtattttgaatgtcgtaaacatgaagatttatatttatggatttctaaaccaccaaatggtccaacaattaaatttcatgtaatgaatttacatacattagatgaattaaattttacaggtaattgtcttaaaggttcaagaccaattttaagttttgataaaaaatttgatagtgaagaacattggaaattatcaaaagaattatttattcatcaatttggtgtaccaccacaagcaaggaaaagtaaaccatttattgatcatgttatgacattttcaattgttgatggtaaaatttgggttagaaattatcaaattaatgaaaatgaagaattaaagaaaaatgaagaattaattaatgataaaattaataatgatgatttaacattaattgaaattggtccaagatttgttttaacaccaattgttatattagagggatcatttggtggaccaaaaatttatgaaaataaggaatatgtttcaccaaatgttgttagagctcaaaataaatttaaacaagcagaacaagcaaaggagagacaaattcaagcaatggatcgtaaagttcgtaaacgtactcaagttattaaaaatgatccattatcaaatgaaactatttttaatgaagattaaatgatatatagatacgatacatatttctttgaataagattttttcataagtttaaataaataaataaatattatatataaaatattataaataattaataattaataaataaccactcttaagaatgttcctttaagaaatcattaatatatttttcttcatcagaagttgcagcttcaactttaacttctttctttggagttgcagcccaaggttttggagcagctaaaagaacgacagcaccaattgtacctaatgcaagaatttgtggaggaacagatttacctaagatagtatatgcagcacccattattaaatgattatattgttcaaagatttaattataagatttcaaatgaaaagattgttatataccatgtacctcttattcatgttgaagatcaaaaaatgttaatttctaaagagtagtgagattgttattggacagtgttagtattttaattaatggtgtactaatgtaaaagaccgtcgcgtctgtttagaagattattattcattacatgaatatttcacttttaataagggtagagtataggacattggacattcatttggcaaaagatgttaagacaatcgataagattacaatctacattaaataacaatactttacgttcaattaaaccaacaaaattgaaaagaaagaagagatcacttgaagaaagtgtttcatttgaagattttgtacttaagggacaagttttacatgtttatagagatattttacgtagtatttataaagtacctgataaatcattgagagaagaagttaaatttttcattaagggagaatttaaggcaactaaaaatgtaactgatttaaatacaaagagatcattattaattggtggtatacgacaatggaaaagtgtttgtaataatatgggtttatcatatactgatatagttttttaaatattgtatgtgtgtgtgtatgtttaatgattttgtttatagagtttagtatatacatgatataaatagtatagtatagtatactaacgtttaacccaagttggcatctttctagctttctttttaccaggtttctttctttcaactgatcttggatctctatgtaataaacctgcacttgaaagtttttgcttatataatggattatgaatacataaagctcttgataatgctaattgtaatgaaccaatttgacctgttggtccaccacctcttgataaaccaaaaatattataattattctcttcctcaacaacttgtaatggatataataattttaatctatcttgttccttagggaaaacttcttcaattgatttaccattaattaaaatttctccattacctttaacaagataaatttttgctgatgatgattttcttctaccaattgcaattgctctacctttattatctaaagttttaacttcacttaatgaattgaaatcattcttcttcttttgatattcagataaaatttcattaatttcatcacttcttaattcaatatcaattgaatcaattctttttaaaatatttattaattgtaaatattcagtctcttttaataattcaccacctgctttttccttatattgtttaaatttaagccatgatgaagttgatgattttctattaaatggtaatgttgcatttttatttaaaatatcttgtaattttgacatatgaatttcatgatatggatttctagcataaaaagttggaatacttggtacaattctacgttgttctaattctggaatatatcttgaaattaatggatcattatataatttattatgtggtttaaatattattttttcaaaatttctatttcttgattctggaattgttggtggttctaaaatttcaactttttcacctgtagttgtagttgtagttgtagttgttgtagaagtagtacttgcactactaatagtactattaaaacgtactgaagatatcaaagatgacctaatagaggtcaaacgattcatcattttacttgtctatagaatattaaataaataccaaccaactacctacttttcttcctcttgtaacttttcattcttcaatttacgattcaatcttttttcacgtctctccaacattggattcttcaattttaattttttttcaaccgccgatcgacgcacccgtacattattaaaatcaccacgattacgtaacccacacaaatcaaataaacactgcgccaccacattgactccatgcgccacatcacttttacaaatagtggcaaaacttggaggctcaattttcaatgggatcgactgcgccactgctactatcttatctattgcaccgccacatttatcaactttatttataattacgtaaattgaaatacccattgattcaatcatttcaaatatcatttcatcatgaactgttataccaatattaccatcaattaccatgaaaactccctttaaattatcccttctctccatataatccataactaatttaccttgccattttttacccttttgtccatatcctggactatcaacaattcttaatttacctccaatattataaaaatttaaacatggtgtataaccagcttcatttttaacatgtgcaaatttttcaatgtttttattctttcttgtcggattacttaataataaattaattattgatgatttaccaacattacatctaccaataaataaaatttcaggtatttcattatttaattctttaactttttcaaaattatgtgcactccattccctccaaatatgactatcttgcataaatttactcataatggaaaatttatcattacttacactccatttactttcaattggtgttaatttacttaattctttattaacttctcgtacaaatttctcattcttatccatttgtactttcttagtaccatttgtagtattaacactcacatttttagctttaataactggttcttttactagttctgctaattttgaatattttccaataacatcactataattccgtatactattacctattcccttccaatacattgctgataagaacccaatgatatatatctctatcatgaaaaattttgacattatacaaaaaaagctatactaattattatacatttcattacgtaatcatctacatttgttcactatacgtctttgctaaacttctaatagttgcaacaatatcacgacattcctttgcattttgtgcttcaagataatattttttaacaataccttcatcatttttcttgattataattttaaaatgatttggtatttttggattttgctttattttcaaaatttgtgaaatttcaaaattatatgttttagaatcataccatgtacccttaaattcattaaatggtaataaataaatcgtataaccatcaactgttaatgtctttggtaatttattcttaaatttcatatgttgtcttctccaaactgtccatctatgatacattaatgcattattagtctcatcatcaaattcatttaaattattcttcaacatattgttattattctttaataaattatgattactattattgttatcatcattactaatcgtactcttattccgattcttattcatcatactacccatattcatactcatacttaaattcataaccatactcttactgttattaccaataatactattaccaccaccaacaaaactgttatgatgatgaatattattgttactattactattattgttattattattattatcattattaccattattaccacctaagcctaaacctaatccaaaaagactatcactatcattcctatctttaatctcattcctttcactatgttcctcacttcttcttctattatcatgattattatcattaattataccaactatttcattattactattgtttaaatcttctattaaatgtttattactatcataaggtgtattatatgctcgaaataattcttgttgtgttaattgataatgttcagctgtattatgcagtatactttgtaatgtattattcttcattttaaatttacctaacttactctccttattatctccattggtattattattatctccattattattattaacattgttattcaaatatttattgtatttatacatatgatatttcttttgtaattgtccatctcctttaattttaactgacattttattactaatattaccaatacctgtagaaattttattactgctgagtttccttgaaatgaatttattaacatgattattactgttaatcttattatcctcctcattaattccagtctcaaaatcactatcttcatcatcatcatcactatcggaatcatcaataataaatctttgactattattaatatcattatattgtttagttcttggtatggctttaagtttattattatttctaatattattatcattagctagtaattgggcaacatcaggtgttaaatcagatggtaatgttgcaactgatattcccatatcattaatattatcattttcagttggtgaactttgttccatttcaacgctaccttcaaaactggttgctaaatttaatccactaatctcattcttattattatctaatggtgatggagttttcttttcattaattgcgaattcttcatctgtacatttaattataacaaattcatcagttccatatgattcaatacttctaagtctatctaacataccaaaatcatcctcaatctctccatcatcatctgcaatatacattttccaataatttggattatttaaaatatctttattaatatcaaattttttattaccttctctaagtttaaacaaaacatatcctattaattcaacaacatgaacagatgaatttaccaaatatgtttcagcttcaatcatacctaaatcaggtagataaatacttaattcaatcagtttatcattaacattttgtttatctccaacatatttataatatgataatgaaatttcctttttattaattaattctgtaagttttgaagaatgctttattacattgctcacatcaattttatacggtttgaacatttctttctttcttaattcctcttcatgttctaaatcaactttcttatgtctttcatgtcttttgatcttttcattttcatgaacattgtaaagactattaaaacttttaactgatttgtaactttgtttacttaatcgtctagttgttttagtggaaatcgtactagataatgatgacatatcggaatgcacatgtttcttattattgttattttttatattaccatcagttgtctcaggtcggcttttgataaaacttatatttgatattgaatttttcttttctttattaattaatggttgaggaataatatcattatcatttaatgaatcatcatcaattactgatctgtccagcgacggtaaagaatgtgaaattgaatgtgatacagaattttctgaatcatacgttatttgatcatcaatcgcttcattgatactaacatcatcatcatcactttcatccgtaaactcatcatcatcatcgtcatcataatcagcatcttcatcgtcatcgtcatccattccattgaatgcatttggtgttaatcctaacattgcagcatgtggtgataatgaattttgtgttgaattaaagtaatcataatcagaatcagccaattcacttgattcaatcgaatcaacaacagaatcattatcactatcgtcataatgatcattataattatttggtttattcactatattatcatcatcagatgaatttatcagatctctttcagaattagatgatgagatatattgatctgaatcaaaatcatcatgtttaacgtaattagaatgcgtccttataatatttcttttgacatccttacctctttccatttccaattctcttttattttgaacagtttctatactttccatatcactttgactttcaacattattattattatctttccctgtacttttattagtgcctgtactactcctactcctactaccaatcccaccatcaaatcttattggtggtgaattagccaatttattagaaagaaaggggaaaacttcatttatactgtttttattattattttcgatatcattgaataatatttccttattataaactgtaccaaataatgaagacgaattatttgtgttgtttgttatacttatactatttgtattgtataatgtatcagtaacagagagacatgtttcacgtaagatattaatgagtaatgtctcatctaatggtaatgccattatctgattgatggttcaaagattaatgacaaaaaggaatgttctagtaataaataaagtttagattttgatgataataataataatcctcgcggattcatgtggaagtagaattagatgagctgatggcttatttccattttgatgttgtgtttgattttgtgatttattcttcttttaacgacaacaacaatggtcaaagatacggaatattatgatttaattggtgtatctccagatgcaactgatttagagattaaaaaggggtacagaaaagcagcattaaaatggcatcctgataaaaatcctaataatccagaagctgagaaaaaatttcaagaaattgcagaggcatatcaaattttaagtgatccacaaaagagaacaatttatgatgaagttggtaaagaggaattgaatcaacaaggtaatggtgcaagtcaagatattgatccaaaggaattcttcagtatgattttcggtggtgaagcatcaaaagattatattggtgaattaaattttattcaaatgatgtttgatgcagagaaggaacatgaagagggaaatgatggtaatgatgaaaataatgtttctaaaaagaaggagacttctaatacttcaagtcatgttacattacatgatggtaattcaaagacatttactgaattaaatgaagaggggaaagaagcaacaaaggagaagaggaaacaaggtattgattctgaagctattaagaaacaacgtgaagaggaggagaaaaaagttaaagaattaagtgaaaaattaaaatccaagatgaatccattattagagagtgttcaaaatggacatcttaatacaagtggtaaagattgggaaatatttcaaaagaaagttaatgaagatattgaagaattaaaattagaatcatttggattagatatttgtcatttaattggtaagatttatacatttaaggcaacatcatatttaaaatcacgtaaacaatttactggtggatttcataaaattacttcaaattttaaacaaagtaaagatacggttaaaggtatgatggatatgttatcaagtgcaaatgaagcacaaaatacattagaggcaatgcaacaattagagggagttaatttagaagatatggatccatataagagagcacaatatgaacaagcagttacaggtaaatttatttcagttgcatggatgtcatcaaaatttgaaattcaacaaacattatatgcagtttgtaatttaattcttaatgataaagagataagtagtgataagaggaaattacgtgctgaaatattacttgaaatgggtaagatgtttagtaatgccaagagagatgaaagtgaagaagaagatcaacaagttttcgaaaaattgatgaaggatgcaaatgagatgaaggcaagagatttaaagagagaagctaatatgaaggcaagggaagaaatgagacaaagtttacgtgttgaaagagaggaacgttcacaagctcgtcttcatcataatgataataaattagatgcatcagatattaaatcagatgcatcatctacttcaaattctaatactacatcaagtagttcaggattctttggacgcagattaaagaaattcttataataaatataattaatatataataattagattttgtattcagtgtattattacatagattgtctttaataataattagtaattatcttaatataataattttgaattttttaaataattatatagatcagatcaataattcaagaaattacccgtttagggtacttcctatttaggaaagtgagaaaatcaaaagagcgacttggaaatcgttttctatgagaaaaaccaatttactatgtaactgatcacagaacagaacattcattttttgcagattatgccatttcgcacagtaattgaaaatccgacttggaatgcgcattgtaaaagtctgcccgtaactacctaattaggaaatttcttaataccaagtgaaacattttattcatttacatcaatatcccatacaattatgccaattttttgctgttttgaaattctacagtatactcacaatcaaatacttcattactatatataccaagtaattatcaagtaaattaccccaataaacaataaatccataatatcaattctctttactagagaaacccttaaaaaaccaaaattttcatttaacgtcgcttataaaaagaaagtacttcccattaatattattcctcttccacctatttcatctttcctttcttttggtatcgaaagtgacaccccctcagaggtatctatttgataatctttatttgatatcttgttttgaaattataattcattttgacatgtcgcatattaacttatggacatgttgaattataattttcaattcaagtatattagattgatatttcaaggaggggcagactattccaccagatccggctttttaaagtacctgtcatttagcttaaacaatgacatgtcccgtagagtcggaacattatatactcaagtatactgtagattgaatgttgtaatcatgtaaactgtaaaggcggcttatacatttatctattcatactaaggtgatggatgatgaaatacttacttaagacatacgacacatcaaatttccttgtgagatcaagaaattccatttacaatttctcttccctgtactttcccagtttatcgatgtgtatcttttcgaaaactttctcttatctctccccccatctctctactatacacaatgttcagatcaaagaagacaccatcagagagagaaactcgtatactgtttatgcaagatatgtataaaaaaataaccaatgcaaattggactgcaatgagtcttgaacaaaatggtcattataaacatgctttaatgacttggaaagatttaaatatttatacagatcgtgtagttcaaacacttaatgaagaaactattaatttaactttatcaaatgatgagaaaatcttattagatgaattaaataaactacgagctgaaattgaatcaaatttcattggatcttcaaaagcaatggaaaaattaattcaacaacaaaatcaacgtgaaattgaattagagaaagaaaaagaaagggaaagagaaagagagagggaatttgtagaatcacaacaaattcaacaatcacaacaacaacctcatgtaccaactttgagaagtaatataccacatacaatgaatacacgtaaacctggttcaaaaatgatgaaatctttaagacctggcggagtagtttcttattcttcaacttcaagtataccgtcaccttcaaactcacattcaaacacacacacacattcacattcaaataccaatacaaacacaaaaaactccgctcaaactgctgctaatattatatgggcaccatcaagttcaattaatgttaataatacgaataatacaagtactacaagtttaccatcaattgaagatttaacaattaatgaattttcagatttcagtggaccaggatctgcaattaccaataaaaaaactatctcatcatctgatagagctaaagctgcattaaaagcttcagccgctgttaaatatccaagacgtgtaagaggtggtgttaaagatataagatatgaaactagtagtgcatcaccttcaccaagtagaaatttaataaaaagtgataaacaggataaacatgaaaaaattgacaaacaagatagacaaaataaaaaaattgatgttgaagttggagtacttgatgataaaaaagaagcagtagttgaaaatgataacactaataataatgataatattgaagaatctgaggaagatgccgatgaaaaacttttaagtaagattaaaggggttgatttaaaatttgctaaaaatattttaatcgaaagtaatagagatcaagacaaagtttattgggatgatattgcaggtttagaacaagctaaagaatcattaatggaaactgttgtttacccctttttaagaccagatttatttataggattaagagaacctgttagtggtatgttattatttggcccaccagggactggtaaaacaatgttagctagagcggctgcaactgagagtaattccacatttttcagtattcaatcatcatcacttacaagtaaatggtatggtgagagtgaaaaattagttcgtgcattatttcaagttgcaaaggcaaaggcaccatcaattatattcgttgatgaaattgattcattattaggtaaaagatctggagatggagatgatgatacaagtcgtagattaaagaatgaatttttagttcaatggtcggatttatcaaaagctgcagctggtagaattgatgatgataatgaaccacctgcaagagttttagttttagctgcaactaatttaccatgggcagttgatgaagcagctagaagaagatttgttagaagacaatatataccattacctgaacctgagactagattagctcattttaaaaaattattaaataatacgaaaaattctttaagtgatgaagatatgaaagaattagttgaattaactgaaggatatagtggatcagatattacatcattagcgaaagatgcggcaatatggcctataagagaattaggatcgaaaatgctggcattgaaagaaattgaaattagaccaatgtcacttgatgattttaaacatagtatgaaaaatatacgtccgagtgttaaccgtgaaggattagctaaatttgaagaatgggctaaagaatttggatcatcaggggcataaggggtgaattgatccggagtatttattatttatattgtattaatatttcaataaattgtaactattgtataagtttttttcaattacttaattatttttactaattcgtttaactaacaatttataaaacaaaaaagataataaactttcaattatagcattaaaaaggtatgaggtagttatgaaacaatcagagaataatgtccgtagtaaattagcaatcttataacaatagaaatacaataagaatttagttaaaatttgggcattcggatttagtaaaatagatcggctttgatataaaacgcgtttagagtttaccttttcaggcactctattcttcaaattgtgcgcgtttgcctattatattttaatctctattgtactataatttactcaattggtataaccatgtgtttgtccgacagggttatcgtattattaaattttgataagttttttcaaatttgtaaattggaaagttgacattataaaaatatcaggtactgccccttaaaattgatattcatatagatttaataaaaactttttattcctttggtttccaatcttttcttttgtttcttcttgtaaactcttttaacaaatatttttcaattgataatgtcctccttatcactttcagttttatcattagtatctgcagcacttgcaacttactccaattctactgctcctgttaattttgtcactggtacatatcctgaacttattgaagttggtacatatgcaaaatgtccatcattaaactttaattttaaaaatcatggttcttacccacctgcaagtgcaagtgttgtctctgcttatcaagttgatgaaaatgattatgaaattacacttcaatttagtgcacaatattgtccaccactctctaatttagatcaagctgcaattattggtgttaattcacctgaatcatcagtttattatttacatgattcaaatcaaaaaattagtaatattgcagattcatgtgattggtcagcaagttttgttgttacaggtgctgaaactgatggtgttgtatgtgttccaaatttccaaattcattattcttggttctcaggtttagcatcatcatcatacgcttcatcatttaaatataattcagcttatgaatatgcaatgaattgtgttcatgataataataataatgcacaatctgatttctcacaatactgtttcgcagttgattcagttccagaatcatcatcttcagttgcatcttctgcaattgaatcattatcatcatcagttgtatcttctgcaattgaatcattatcatcatcatcatcatcagctattgcaacagtcgcaccatcaactatttcagttccaacagttgaaccaaccacctcttcatttattgatgtcccatcatatgttaactcatcaattccatcaactacattctcatcatcattaactacaattactacatctgcatcaggtaataaaaaattagctgaactttattatcaatgtggtggtattaattggacaggcgcaactgcttgtgttgaaggtgcagtctgttcatcaatgaatccattctactatcaatgtgttgctggtccaactcctactactactcctactactactaaagctactactaaatctaccacatcaaatacagcaattccaacaactactgctctattatatggtcaatgtggtggtaataattggactggtgcaaccgtttgtgttgaaggtgcagtttgttcatcaatgaatccatattattatcaatgtgttgctggtccaactccaactactactaaacatactacatcaaatactgcaattccaactacttttgcaccattatatggtcaatgtggtggtaataattggactggtgcaactgcatgttctcaaggtgtctgttcatcaatgaacgatttctattaccaatgtgttatgactgcttattaaatccaataacaaattctacttaatttacttcttaagtaactgtatacttatttaaaacttctaatcgataccgttaatctacttttcttggctgtaataattacaatatcaggaaaattcaacatcaaaattttaaaataatttaaatctatgttatgtacgaattgggtgtagtgcaagaaatcgaaaaattagttaagaaatggatttctgtcaatgtttatgtcataagcgctcttatctcggaactttttcctatttgggctaccaaacggatttactcggaatttaattatcttatcagataaggcattatcttttaactgtcaaactgataggaatacataccaatttattgctgaataattttattataaattgcatgttagagtacctaaaaaattaatttgacataaactgctaattcttatatctaccagacattcaaagtttattgaaaaaatgacagttgcattatatccttatccaaaagttagttctgaattaggtcatgttgaaacctacaaagattttgctccaactcataagattccaacaaagacaagagaattagagattaaatcacttgttgaaaaaattacttcaaacccttcatttaatcctaatcttaaatttgatgcttcaaaacatatagttttcgatccatcttattataaatcaactaaaacttttactcttgatgaattgaaaattaataaaactcatgttccaagagttacagattttggtgctgcattcccatttcctttattatcatctgaagctgttgatatggtcttatatgaagcattacaacctgaaattattgaagattatgcacgtttaccaaatcttgctaaaggtgcaactagattagatttccatattggtggtcacgctgatgatcatgctccatttactgatgcattaattaaatcacctgaaattgcagaaattgtttcaaatttctttggtactccaatgtcagttatttataattcagagagagctcatttaaatgtttcattagcaacaaaggatgaagaagaaattgctaaatatccaagttcaaaggaagaaattatgcaagctttaaataatcaagatgcaggtgatggtgatgaaattccttcaactttaggtcttcattatgattcaacaactgttgccttagttgttatgttagatttaccagaggaagcagttggtggtcaaacaactattataacaggtgatgaaaaagttgttcgtgtacctgaacctaaaaagggttatgcgacaatgattcaaggccgagttttaaaacacttagcctcaaaacctgttactaatcataatagaatctcatttgttaatgggtttgcagttacaggtcccgaacagttagataatactgcacttacatcaactaaaccttctgttttaccaagagctagatatgatttattctatagagattgggttgattataaatttactcatttagaagaacatttgaaatatattagagaacaagttaataaagattttagagatggtaaaggttttgatcaagaaagttttgttaaaaaatgtcttaatattgaagaatattttaaaaaatgttatgatgaaatggaatgtgttaacaatccaccttacccttcacctcatttcaaaactaaatatcaagattattaattataagctggcttattatcattatctttttaataaattttttactattctttttacctttttaattccttggttttatattttttataattaatacaatttattcctatatcatatacactaattgattacttacttaaagtccaaataagaacttaatggtaataagtaaaattgcaattacacttgaaacgtgtactccccaccatacatgaagtagattaaatctacattctgtatagtcaaattcccatttagttgaatctttattgaaatgacctgtcataatacccgtattaccatgataatcacccatgattgatctaacagtaatttcacgaatccatttatcactatcaatactctttgatgcaacccatcctttctcttcattaatgaaactataataattatcacatccataatgatcatgtccagttaatataataccacttttaccatcaccaaaaacagcatctaaaacacgtcttgatacatgttcagataaatgattttgactcttcaataatccaactctatcaggactacatccatgacacccactttctttataatattcaaaatttggtccatcatgacataatccagcacgtttatacattggtatatgtgttaataaaattgaacttccactatatggtgtcttttctaatgttttaataaatttccaagtatattgtttgaattcatcttgaagcattggtccctctaatgataaggaattaagcataactattctccatggatgatcagtatcattatcatattcaatgataaaattagttttaccataaagtttcatccatcttgccatatgctggaaagttgtatcaccatatccaatatcatgattacctgtaatatttaaaaataatggttcagtattataccctgttttaggatcaataaatttaccaccataccaatcataaacatctttgaataaataaaaatctttatcttcaaatgtaccattattattcctttcataaaattcattcatatatttatgccaatcaatatttttgtgtttattgatgatttccatctctgctaaactttgtccctcaggtctcttgaatgatctttgtaaaattcttcttgttctattgaaaaactcactatctccaagccattgtgaagagagtaaatcacccattaatacaacataatcaggttctaatttattcttcatagtatcataaatatgccccagaaaataatcatttgcaaaattatcagccattttagaatatggagttgatggccaattaccattgatttgtggatctccaattgccatcatacgtatatcacgtggattctttggtacatcaacctctttaagaaaatattgtttatataaatccccaaaatatggtaattttaataaatattcttcatatggtgttagattatcataattgtaatattcatgtgaccatgaacacttttctgaattcaatgatggatatgtgtaaagatatatgttagatacaatggctagtatcgtaacaaatgctgtaattttgctgaatttagtcattgccgtcaaaagaaagtacatatcaacattgataatgttaagctttttacccacttaatttcaacacttttttttcatgggccctctccctctttctcgtgtgggggactttcccaattcaaaaagttagttatagtcttacaatcttaattattatagtttattacaaatacaaaacgtttcttttaaatacatgtacaaagtatctagtaccttccacctccatatccaccaccgtatccaccgccgtatccacctccatatcctcctgcatatccacctgcgtaattatttgagtatccaccaccgtaacctccagcatatgaatttgaatattgttgttgacctgcaccattgtaatgaccaccatttggagctccacgattctgtgatccacctgccatttgattttgcattaatttcttgaaaccattacataaatgaaccatatctggataaatatttttatgaagcatataaccatttggtaatcctttaacattccatgtgtatgttttttcagtattatcatttaatttgaataaaaggaagaaataaccaggagttttacgattgaaacagaaacaataacatgctctattaccattagccttagaatatcttattaaccaatcacgtgcatcacttgcaggttcatttctgaatttttcatgattcttcattaattcaactttattatgtaattgattgatatatgaaacaattaattcatctaaatcatgatatttataatctccaatttgtaaagttttaccaagtgaatattcatttgccttatcaaattcttcaatatcaatatgttgaaataattgattatcaactttccatgtaatagttaaatgatcattacccttatttgatggtctaataacaaattcaccattatctcttgatgcaagataatcttcagcttgagttgcatcaaagtttctgaaatatggatgtttcaaaatacgtttattacctttattttcacgcaattctgcatcacgttctctcttaatatcagcattttcagcttcaaaattccataaatctgcatgacgatcaccttttttattggattttgcacgtacaatatcttccttcaataatgaaaattcagctttaaattctgcatgatcaacagttttaacaacagcttgaactgcttgaccaatattatatttagctaacaaacttgaaacatcaccatatggaactgcattagctcttgaaacatttcctaaaataccattttgagtaatacataataaatatctattatcaaccctttgaataataattggaactatgacacctctctcaaaagtttcagatgtttcatttgttaacatctcaaaaacttcggtatcagttaataaatgaaattcttttcttaattcttcatagttgttttgcaattcttccttaatcatttccaaagtagctcttttacgatgaccatgttcttctaattgtttggcataaccttcaagtaataaatcttccaatttcaccacaccttcatcatataatttaccgataacaccaccactttctgcttcaacttctgcacgatcttcatcttctaaatctaaagcatcacttgtcattttacgtgccaaatcataatcttcaggatgaatacgtgttgcatctaataattcaatatctttatcaaatttctctggaactggaatttcaataaatggtgcacaattcatgaaaatatttttggtgattaattgcttgataattaagtcatctcttctaattaacaaaccaccgtttgcttcaatacccttaatcaaattacttgcttttcttggacctaaaccagcaatatatttcaaagattgagctagatatgtcgacctgacagcatcattaattttaataccaactaaacatgtaatatcaactaaaatagattcaattgctgacattaatttatgttctggcagtaagttttgatgtttatgaatttgaattgatgtaacagtatcacctaatgatatatattctaataatggactttgaacataacgagcaatagaaatacagaattttgcaacaacaggtttatcactaaattcttcattagctctatcggaatattcatataatcttgcagcttcattttcaacataaataacaggtagttcaacttcattttcagattttggtttaacatcttcttcataacgattgtaatcatcttcatcatcaattgaagttttcttattattaattttaacaatttcatgaactcttttctttaattgtgaacatgaaacattataacctgaaacaccaataacttcaggcttaaatctatcaattaaatttaataattttctttcaaattcaggatctctgatgttttcatcaaatttgacatgatgagaaatagaaccatcaaaatctaatgcaattgcaataacagcagaatcttttgcaccctcaccattagttaatgctaaaacacgaggagtcataccctttctatctttatcaggaacaaaaggtgcttgatcaactttatctaaaaatttatcacgaacttcaaaatataataaacgttcacaaactgtcttaattttttctttgactgataaaataacattcggtattaaaattttaactgcaatatctaaacattcacgtcttaatttattccaagcaattgaattttcagatgcaccatcagatgacataaaagtaaataaatgatcaataaatcctgaaaaagatgtctttaaaccaattttgataataacataacctaaagattcagcttctaacatacgtaaaaatacatcaggcttataataaaatgagtttgggtttctattaatggcatatttgaaatctgcgtatggagaactgtcattgattttagtacgacccttttcagttaattcaatatcaatattagagtattgttcaaatgtagttctgaaatgagaacgaatcttaggattatgaactaattgttgtgcaaacatttgtttaatagcattcatggcaccatcagtcgtactgaaatatgattcagataaatattcagctaatagtttttctggagtttctgtattatcatctgttaaataaattttagaatttgaaacaatattttcaccaattttttctgcatcaataccaatttcttttattatattgtacactttatcactcttgactctttcaaataatttgaatctagaatgagttttctttttcttatcggtagttgaagaatcgtcatctttttctttggcattttttaattctaaactgtaagtgaattgaagataatcatataaatcttgtaaatcagtaattgtcttagctgtactaatacattcatcatataccaaatcaacagtatctatactcttaaataaattgattgtagcttgcctcttttcataaacaccatggtagtcaatgtcaagttgtaaaattctccaaagatcattttcacttaataatttagtggcttgaatttcattcttttcattatgagtggtatataatgtataatctttacgtgcattccagatagttgggacttctaaattatctcttgatatgaattcaactattttcgcaactgatgctttgaatggttcaattaaatgttgactaccttcttttccaaaaaatgattctttttcagcaaataaagtttcagcaacccaattttgtttatctttaaagtcagaatcatttaaattatagtttttaatattttctcttaaaagttgataacgttcaggtatatctttggatctaataatatcatcattatcagttaataaatgttcttttaattctgtatattcaaaaatattttttaatacatttttttccttatttgaactggatttttgaacaacattaccatcttcatcatattctaattcatcattttcatcatcttgatcatcatcattgtcagcatccataacatcctcagcttctaaagcccaagcatattcttcaccatcaccgaaaatttcatataattcatccagtttatcttgatcgattttactttgttgagcaaattgagtttgtttagctcttgctgatctcatacgagcgagcctttcatctctatcttcatcgtcttcagaaaattcatcatcttcaataaaatcatcaaattcaccagctaaattctgttgatttaacatacgttgttgtttttgctttaaagcatctgctaaatcatcatcttcatcatcattttcgccattcaaattaccactatctgcacttctcgctctagattcatcatcatcatcatcattatcatcatcatcttcatcagagaacatattagttaaaccattggatgctgtgttaccatttgaatcatcttcaactcttttaagtcttttgaactttgatttttcactcaattcacttggaagttcacctgcattttctcttaaaagagctaaatcatcttcatctaattcatcatcaacttcatgacgagaggaatgatctctatgtcttttcttatgagatttcttagaaccttcgttatcagaatctgcatcttcctcctcttcttcttcatcatcaacaatgaatccttctctaacttttctgatttcatcctcatcctcatcttcatcttcgtcttcatcagaggaatcaacagctgctttgacttttctactcttatttgttatttcttcatcactatcgttatcatctgaaagtgcagctgaatcatcgataaaagaagatttttcttttctagaaactctagcaatatcctcgtcgtccgaagaagccattggataaacttaaatagctagaaactagtcttttggggataaaaaggaatgaaaaagtggtatagttaacaaatcaatacatactgtttagctgagcattccgttttgccttgtttttcatcattatgaaagatttaccaaaattgcgggtaacttgacttacaatagtcgcgaccttcagcggggctcagctaaaagtgagaaatttttcagagttatacattaactgttttattttatatcgattttaatactgttacaatactaaggactagttaccaaagtctgggaaaagatctggtaaatctctagagaggttacctcctctgttaccaccccttcctctacctcttccaccacctctgccacctcttctttctttataaatacctcccggtcttctttctggacctctaaatcctctccattcacctgaccgacgatcatcgccatatctatcatttctataacgatcatctctgtaacgatcacctctgtatctattgtccctgtgatctctgtaatcacgataatctctagaatccattctgtttctgtaactatcattataaagatcattatcccaacgtctttgatctctataagatcttggatcattactataagcatctctatcattgtcatgagcataaccaaacacacctgttgtttcgacaccttgaccagttataagatctttttgataacgtgcttgtttaattggtgctgtattctctcttgctggtggaagacgtgatgtatcttctggttcaccatgaagtaaataataacgggagtaatttttagcatctttaactttacgatcctttggtgtactgtatctaacttccagtttgataatcttattagattcatcagataagtctaatggttgcatttctgattcattatgttcttcaactgattcaatagcatcggttttaatttctgcatcttcattggaagtttcttgtttttgttcttcaatacctaaaacagtcttttcaaaaactttatagaatgatttagcttgctcagttttaacaactttaccatctttatccaacactaaatcccaacattgtctatcttgaagttttggggcttgtgtgacagctgcaaattgatcttcaatgggaagttctgaaaattcttgatgttctctgcaaatattttcaaaattggttaataataaaatagcatcagctgcaccacgaattgattcatttccaatttgagattccatatcatcgcccttatcgtcattattattatcatttgtactttcatcaacttccatttcattttgagtttcaccgttagtatcaccttcagtttcaggagtttcaccatcaagtgctttaagttcatcaaataaatcaggttgtttactcttttcttctcttgttagtttacgattttgttgtctttcagcttcgtacctttgctttgcttctttattttcattatagtcaaagacaacattgatttcatgatcatttatccatttcaatctgaaatccatatatgaatatttctcatgtgttgcaaatgaattcttaggacgtatatgttgttccaagtattctttaatttgttcagtagataaatcgtccacgcccgataaatgtaatgaagtcaaaattgtttgttcttcttcaacatcattctcaacatctggttgctctgcaatttcttctccttgtaagtgtggaggtaatgtatcctgttccatctttgatcgctcttttaagtagaagtaccaaagatccataaacaataaccatggaatgaaatgttaatatagaaaccctcaaatttcatggaaattgcgaaagcgttttgttgatattttatttgcacattttctttacgtttttctacaacttcttcctcctttcttcttctctttttgggatctttcttttatcgtgggctgctaagaaggtgcataggcgtatatctgtagcgtatgccctgatactttggccccatatagattacctagaacatattctccatcgttcgtggtcggaactaaccattgtggttttttccgatatgtcatagatgaatgtggtgaagtacctaggcaacattttcttcatcaagttactgtatctttgtcttgtcttttacataaaaaaagtttatttacttaggcattcggcttgttactataaaagtatttgcatatcctccgaatacattttgaactactctttcaccatcgtcttggaaaagtaacttcaaacttccatcgctagacggtccacaatttccatgctctccccaaccccaagcataaactttatgtttgtcttttgtcactaaaagaccgtgttctgtacccacatcaaaactaccaatttcttcttgtaactttgatccatcgtacttttgtccataaacattattaccaaatgaaactaatttgttaccggtatcatctttattgtaccaaacgtgaactgaactccacatactttttagatcattaattttaacgtgtttgtcaacaaagaaccactgacttttattcactccaactgatccttgcatttcgtgaccacggtcacctatagttgaatacatatttgtaagtatactgaacctatcagttttgcatctcataagaataatatttgcatctttctcttcatcataaagatgaaatatagtataatctctacccatgcaacaatctaacacaatcaaaccattaaaacttgaatttggtaaatcttcaaaagttatctttgttggttctggcacaattttatcagttataacatcaccaaataattgtccctttttattatctccaaatgcaaaggcagaacctttgttatcaacaattataacactatgtaatgaagatctcataaatttagcattttcagaaagttcaatcaagtgtctttctccgttcttatcatacagaaaaacagaaacgttgtttttaactatagctgtaaagtcccatccagcacaaacatgtgtgacacccttttgtactatgtcaaacctctcactatctgcaggatcgaaaaagccacattgttcccctgatgcaaataaattcttatttttgaataatattaaagaatgattaccacctatggcaatatcttccacctcttgatttactgcaatagaaaacgttggtcgatcaatatcttctgaatggtttagccctaactggccattaccatttgacccacaacagtctatgtatcttaagagaaatcccataatttgccaacaaatataatcagacacgataattaataagaaagacacgttaattaaaagttgagaatttttaatttccactgaaataatttaatggcagtatcaattttcatgttgatcatctctctttttttcattttatcatagaaaggaatcaaagccttgaccatgaaaggaaggactaatagagctcctcgtgtcggaacggtaattgaattgctttcaagtacagatgctgaatctgatgtgcagagtgaagttgaggatcaaagtcctaaaattaaatcacgtaaatctaagcaacaaagtaaaagtatttcaagctcggatgatgatgagccaatagacgctgctgatgatgatagtgataactctgctgatagcaagaaagattcccaaaatagtggtgtggaagtattatttgatgaagacgaatctggagatgaagaaaaccaagaagaatctgatgaagatgatcaggaagatgaagatgaagatgaatatgttgaacctaaaaaaaccaaacaatccaaacctgcgcaaactgcagttaaatctagaagtagaaggttatcttatgaacgtaaaaacaatattgcagatgaaactagtctgatcaaaattgatgatagtgatgacggtgaagatcaagaagaaagcgaagaggaagaacaagatgatgatgataacaatgataacgttgaagatgacgacagtgacactaagagtgatgaagatgacacatctatgattcaagtgcctaattcttctccacaaagaggttcaaagcatcatccatctgaactggattcatccccacctgcaaaagttactaccaagttaccaaaattacgctcttttgaatatagtggaagtccatcagactcttcatattctttatcatcaacagattatattacaatgaaaaaatcttttccgaatttacctgctggtaccattatgaatgctttgaaaaagtaccaaactatatccaaaacttatcatcatttgaaaagtcttgaaaggccatctagtaattcatcttctatgcgcttggatacattaacaagtaaaagaaataaaattaacttatccgattctccaattccaagtatgaaaccgtctgcaaaaacattaattctgaaatctgaaagattaaagaaagaagaagctaaaagaaaaaaattagaacaagaaagagcatcagctagaagaaaggcagaacaagagaatattgtttcttctaaggttgtgttggatttatccaaaaagagtcttaaagatagatatgtttcaaataggtttgcaaatcgtaaaaatgtaattcatgatgacgaagaagatgacgaagaagatgaaaatgatgaaaatattgattctgatgatgattcaattgaagaaatttcgagcccccctccaacttcaaaatcgaaaagaaggtatgaatacgatgatgattatgaagtatcctcacgtagtaaaagatccaaagcagttaatagatctgtaagagaaaacaaaagagctgttgttgaagatgatgatactgatttgttacttccagaatttgagataaacaaagattcaaaccttaatattactcaaaaagttatgaaattattcaataatgcagacattagagatatcattgatattagtaatatcaaacccgatgaggctaaaattgtttttgatagtagaccatatcgtttaaaatctgaactaattaaattaaatgtccaaccagataaagtcaaaacaaatagatttagaaaccctatggagagatattttgaaactgctgaacagaaattaactgcttaccttgccattgatgatttattaaagcaatgttttagttacagcaaatcgattactacagaaattaaaaaatggggtattaatttgaagggtaaaattttagatggtgaaatagcaataacaaacgtggaagttgattcagaagaagaatctgaagacgaatctgagtcttcagatgaagaaatcaaagaagccaaaaggtataacaagaagaaatttagaattgacggttcagaatttgacgatgatttttcaacaagtaagaaaaaactaagatacaaatccagtttagataatagtaaagctaaggataaaatagggtattttaataaaaagccagttttactgtccgatgatatttcattaaaagattatcaacaagttggtattaattggctccatttattattcaaaaagcaattatcatgtattttagcagatgagatgggtttgggtaaaactgcacaagttattgcatttttatcacatcttaagaaaaaacgttaccctggtccacatctcattgtggttccatcttccaccttagaaaactggttacgtgagtttgaaaaattctctcctactctgaaagttataccatattatggttctgttgatgaacgtgaagaattaaaagcggttttatatgaagaagagtatgacgttgttgttactacttataatttagcagttggtaaaactgattcagtatttttacaatctatgaatttcaacgttattgtttatgatgaaggtcatatgttgaaaaatgcaatgagtgacagatataaaaagttagttagacttaaggcaaattttcgtttattattgactggtactccattacaaaataatttgaaggaacttatttcattgcttaattttattttacctgaaatttttgattccagtttagataaattagaatatttattcgatcaaaaagcaacaaccaagaccaatgaagaaaaaattgaaggtaaaaattataacccattgatgtcagaacaagcaattaacaaagctaaaattatgatggcaccgtttgttttacgtcgtaccaaagcacaagttatgaaagatttgccagaaaaacatactaagattgattactgtgatttagttccttctcaatctaaaatttacgaggaagaactggaaattgtcaaacaatttagaattgaaagagaaaaaagaaagcttttaactgatgaagagaataagaaattacctccattatctaaaaaatctaccaatattttgatgactctcagaaaagcatgtatgcacccattattatttagaaggttttacacggatcaaatgttgcgtataatgtctaaaaagattatgaaaaatcctacctacgaaaatgccaatgaacaatatatttttgaagactttcaagttatgacagattctgaaataacaagattttgccataattatccgaatgaattaggtaaatttgttttaaagcaaaatatttttgaagagagtggtaaagttaagaaattagttgaattactaacagaaatgatttcgaaaggtaaaaaagttttagttttttcattgtttactcaaatgttagacattcttgaaaatgttttatctttacataactggaagtttttgagacttgatggtagtacacaagttgatacaagacaatcaattattgatcagttttatgatgataaaacaattcctgttatgttattaagtacaaaagctggtggttttggtattaatttggtttgtgcaaataatgttattatttttgatcaatcgttaaaccctcatgatgataaacaagccgaagatcgtgctcatagagttggtcaaacggaagaagtttttgttcatagattaattgctaaagattctattgaagagaatattttacatttggcctttaataaacttcaattagataattctatgatggctcaaaatgttgaagatgttttattgaaaaccgttgaagatctcattgtttctaagaactctaaatcaaaaaataaagttaaagaggttaaggatgaggctaatactgatgagattaaaaatgaaaatgtttttgatgcctttgaagctcctatttctgaagaacttgctgctgctgaagcgattgatgaaggtattgaaattactgatgcaaaaacagttggtgaattaaatgatgcagaaaaaaatggtggtagaaaacgtcgtgctagacaaaaagttaattataatgaaaatggtatggctataaatgatgatttacttattgaagaggctactgaagaaactgaaaaatacaataaatctgagaaaaaagatgctaacttttctcctgaagaatcaccaattgctgaatccaaggttgtgacacttgctcctgctttggaaaaaactaaagaaaaagttgtcaaaaaagttggaaaaaagaaagttgacaaaatgattgctgatgcaaagttaaaggaagcagtcatcaaaacgtttgatcaaataaatgcactgcaaaatgcagaaaagaattcagaactaaatcaactgcaaaatcctgtacaaaacattgtatcgaacccagttttaaatacagctcaaaacccattaccaaattcaatacaaaatgtaacacaaattacaccacaaaatacatctgcacacacatatgttaatatacttccaaaaattattgtcaataaagatgctaaaccttctggcacatatgttccagctactccaccaaccgttttaggttcaattagacaacttcttaaggaaactacaccattagatgcaaaaaccagtgcttccgatatctcctcagctttgaaattagaaaagcttgatgatgttgcaccaaaaactaatattgtaaatgatgcagttattatacctacggatggtatgaatgccacagttacaccaaaaaatgatgatgccgatgataaagttgttgcaaaaaataaagaacttgcagatttgactagagtagtgctaggaatggaaaaggctggtaatcaagatgttaaaccaatagagaatggcaaatcaattaatgagaacccgccattaccaactgctacaaatgaaacaacaaacgaagtcaaaacttcagaaccagcagaaaatttaagtgaagacgccaataataacactactgtcatcaaaaatgatgtcaataatgaacctacacagaaacaaataacatctttaagtgatattataatggctagtcaagacctgagagataactcctaggtgattgaatagtaaattttaactttgtaactttttgtattatagataataaaaacaaattaaattataaataaatattctacagtaaatatttctatgcaatatatgaaaactcaactccatactttaggattcttgggccagaatccaatcctttcatatctacactaacaccagagctgacaaaccagtcatagaactttccttcccatgcaacacgcatattttgcttagtgatatttccactaattttaagacttgtgatatatgcatcttcatcagcagtctctttgtattcagatgaagctttcttgttttccttagttttgttaccgacaattgaatcattgaaagactcactgacatctagtaaatttatgttattactttcagtgtattctttatcagaaaccttgtaaacaacattttgtttcccaatatgaggcatgtcatctgtgatttttggactgttatctataccatcatgggtgtcacttttggaagcacttctttcatcatcattttgttttacttccgataatttggatctcagtatttgagcaccaacaattagatcggaatcgtatgagtagatattaaactgatatttagaacttaatacaatacccattttagcaatataagaagttagtttattttgactgttctctggatcatttatactattagttttaaaataagcatcacttctaattgcataagtagattcaaatgtacctaatagtgggttaacagcaaatgtgaatgttaaaggatgtatacatgatatagcgtatggaattgattgtatactttttataggattcaaattagagtagactgatggtaaagattttgttaaataacgcatcgtatcaatataagttgtgtatcttgaagcaatactgacacctggactaacactaccaacggagtaccaaagttcacatcctaatgataaagttgaaggattcatttcagtataattttttcttatttttgaagagatgtatgtagacttgttgattgggaaagttgatggtgaattatctaggttaaaatggtataaacatctaaatccaaataaagcttcacgagtagagtaaataaaatcatgtgagctattgtctgtttgtctttgaagatagaaagtgaaaatagatgttgtttgtgttaatttattcaattttggtgtattgacaaattttacaatcagttgatgattaggagtaaatcttttaataatcattccctcaatgaattgactaggaaagtaaattttcccatagagtagaaacggcttatgatcaatggtatcaccatgagaaatctctttagttatgtttctgtaaccttgtaatatattgtttaatggtaatgttgatgaagatttgtagtatttatccaaatcagttgatgttgaaagataagacaatgagccttcgagacgttcgatttgagagatgttgatagaactataattgaatttagtatttcgatttgacgcaattatactaaagccattaggtatttgaaaatgaagtagatttctaggagtttcaagaatatgttcataagtattatcccaagaccatttagtagaggaataaaaacaattctgtattaaatccatataagaaatcattggagtgtttaaaaaatagctcaaaatagttgaatgatatcttatctattacacttgaatactgtaatagagaaaagaaaatattgttcaaaggaaaacaagtaattaaattgaacaaatatggtatcgattatttaacttaaaacctcagttgatggcacaaaaggtaccggaaaaatttagtgaggaaatttggtgacgttcctttttcatgctgaattttagccctttatcaaaattgctggcgaattcaagttctgctggtgtgttttatagcatttaattatccattgcatagactcattttacatataaataatggagataaaaagtatacaacaagataagaaaactgagagtgtaagtgaaactgcaaaccatattgaaaaagttgagcaacccagaaaggaaagtgacaccaaacaaatagataaagcaaccgataacaaaatcagttttggaatgaacataggacaagatcatattgatgatatcgatgatatacaatcaccacctaactcaccaggtttagtttatcctgcagttatgtccaatacaaatgctaaaattgactttttcgctttagaacccagtgataaacctgctgagcctgaaatttcaagtcttacagagaagaaggaaattgatgattcaaaggaaaatataactaagggagtagataatattagcagtatttcatctgtcacatctacatctattccaaatattaatataactgcatcctctgactcctacttttcaagaacaaggagaacgccatttgagaagaaatcacgtagagcaagtgatatatctgatagatccgatttttatggaagtgtgggatctgttggaagctttgatgggagctttgatactgaaagcgataccgatataactggttcaccatctgttaaatatatgagaagaaaaaccaatagaatgtatgatctcaataatggcaatggaaataacagcaataatactgatgttaatcttaggagaggttccgatactgaaaatgaaaaaactccaagtaggttgaattcatcaggtagtataaaacaatttgatgatggtatagtatatcgcacaatttcgaacatttcagaatctgatacaggatatgatacacctagatcaaacagatccacatacacgagacgtaagtcaaaggattataccaaagataaagaatctattaatactgcacaaatatttaagaatttactaattttagaggaaagtttgaagcaacaatatgtagaacaacaaacattaagatataaatatagtgcgtttttgattgttttattagctatattttctttttccacatacaccagtataacaaggtctatatattcaacggatgttcttgtcactaatattgatgatcaaaaaattgatgaacaccattattataatgaagatattaaaattcataaattggaggaaggatacaatagagacggtgataaattatatgcaatcaatttaccagattttcctacactgcctaattggagtgaagatcaagccacaagtgttactgctgaagctttaggtgataaaaacaaatatgattattcagattccatccataacgatgaattacaattgaatgataaagacgcctctgagtatgggtactcactattgaatattataaatagagtaatagcaatcataacgggtatgacattagtattgttttatttaagtggtgagtatactagaactataagcaggccaagaaagtttcttactaatgctaataaaggtatcagacaattgaatgtacgtttagttaaaatgaaagtaccaattgaaacaagattgaaggctattttaggtatcttgggtgtaaattcacatagtgttcgtcttgtactgaatccaagggtctttaccacgggagtgagagagcaatgggagctctatagaggacagttttggactctgcgtgaaactgttgaaaagaccggttgagcctcccataataataaatttacgtaatgaggaaaattttattccaaaaaaaaaaggatttttgaaaaaagcattacataatttcttactaaaaatttccatggggatacatttttgacagcatcgagtcgttactacactgcgggttttactttttcttattgtgtttttttccatcagacgattcattttcggagaagttcggattgctattctatatatttaagcttagcaagtggttttattcaacccactggtaattatcaaggactaaatctatggcaagacctcccaattcatgggtctgggagcatttccaagaagatacctcacaagttccaaatgacgcttatacatcagttaaatgcaaagtttgtaaaaaatctttacgttattcatcaagaaatggaccaactaatcttgctagacatttaacacggtcccattcaatgcatgcaccagattctaatattacaagacgaccttttgaaccattgaattctcaatcacattctaatgaacgtgttgaaaaatcaggaacatcacatgatcactctcaaccatctattacagctacaaattctgatgtttctgttcattctattgtttccaataataattctaattatacacaatctaatgtaactagcctgtctaacttttctaataataatacttctaataataatattaataataataataatattgacaaaaatactaataatgataaaatatctgataataatacaaataatgataaaaatactgatgatgatgacagaaataaaaacggtgacaataataatagtatcaccaaatatgataataaagtcatacagaagcctggatccaagcacacgaaaaataaaatcagtatttcggatatcaataactcaactgataatattatatgcttgagcaatcagagtgaatcaaaaaaagaaaatttcaaacaatctcagaatcaacgggattcatcaccagtgctaaatgatacactgaataataaatcacctccattattgaatccacctgctttgaatgattctcatttttcattaataacaccttcaaggtataacgataaagtgaattttgatcatggaaaccatcaacaccaacaacaacaacaacagcaagacattttatttcaaactccaatgctgaataaaaaaggtgctattattcgtccaagtagtagaggtttaaataatgatatttttctccaaacaaatcaatattctgatatcaatgccagtaatcctccattacttatttctcaagattacaacaaaacatcagctaataggtctgattatgatcaatttatgaaaaatgttaatttgttgccattatatagaatggaagttggaaaatcgtccactcaacataaatcaaaatcaatgaaaaattcaactttagataacagaaacagttcaacagatattttgttgaatcaaacatcttcttcacctagtagagcgtcttataaattcaaaaaacaagataacacaaacaatcaacaaatattacaagctcaaccccaattcaatcaattatctcctaatgttttaaaaattgctaatatgacaccacaaaaggcatttgaaaattcatattatttgggacaacaaccatacttgtcaccattacatgtgagtcaacaaagtgaaattgataataaggcaaatgatgttgaatctcgtgatttatcagcaactataagtgaaaacagtaatgatggtgataacatatatgatagacaacaatcaaatagtaatagcaatttgaaatcaacatttcaaaatggaaataataagtctgaaaacattaatactagtaataaagatttaaattataactctagtttaccatcatttttcaattctaatatacctgaaataactatcaattcaagtactgtttcaccctcaacacgtagtaaaagtcatgaaaacgttcaagggtatgcacataagagtagtggttctaaaaatatagataatgttaatactggttatgatggtaatggtagcattaataaaggaattgataaacagaaaaccaacaatcagcttaagttaagatttttacaaatgcaaatgcaaaaacaacagcaacaacaacaacagttagaacaattggaacaattggaacaattagggcagttgaatagtttgggattagctgggtttggtcaatttgatcattttgatgaacaattgggatatttaggacaaaatagtgataacacagatatttcgaataaagttgctaattttccacaaataatttcaaaaaatccccaacaattaaacttgaattcaaggacacaatcacaatacaacacaatggttgaacaatatactgaaaataataacgaaattgatttaaacttagtttctggaaatgatgatggaataagtagtcgaaaaagggataaagtttccaatcatacattgttgaaaattgtcaaagacttacaaaaaactgtttataaactcgagagtattgtagctaagcaaaataaaggcattattgaattaaaacaacaagttgctagaaacgttaatagaacaagaggtaatgggatgaaaaaagggtatgatattttaccatttgtttcaaccatttcggaggatactaaggagggtaaaagtggtgatggacttcccaaactgaaaaatattattacattattcactttaacaactcatgaagttgacgagtatttaaaactttatgatatttcaaatactgacttcaattcagatgatgaggatgatgaaataattgaagaggatacaagactcgaactaaataatataaattatagagataaaaatcatatatttcagctgggcaaatttattggatgcaagaacatcaaacgatattggaaagtatatgctgaactttagaaaaaaacaacaaacaactgcatattttatagacgacacatattttatagttcttatacaattttttttatacaaattttaattttatacacataataagtttaacttaattgaattcattgttcaacctctctacctacccataaaacattattacacctcacgaataattcattctctaattttgtacctttggatagatcaggttcttcaccaagtgattgatcaacttcaatgacgtctttcccaagtaataaattcatataattatctattgatactagagttccatggtattctgttcctgaaaacttcaatcgaacaacaacttttttaccaactaatgatgttaagaatggcttagggttaataggttgaaatgacattggtccagtgatcgtgtaataagaactagtctgatggcataatcatgtttctaagatttgattgcaatatttttagtgaggtgagatttttttaagttctttactattagatatttcgatctttttaaaaatattgataaaagtttgtcttttcaaatatatagtagtataatataataaatatatgaaataaatataaatataaataggtatgtctgtaaataatataaatacatgcacgattgtcaaaaatctagaaaatatggaaagtattttactttataagttccaagatgattaagtttaaaaaaattctacttattaaggaagaattagaagtgaattgaaaattaaataaaatttttagtaatgtattattatatgatggaagtttttgtttcttttttttagttattataaatggaatgttatgattttaaatttgataatttgaaaaaataaatttaaagttcactctttaaaggaacagcatcgacatcaccaacaacaacaagattgaaatcagctgggacagaaacagattttgcagcaacttctttacctgctaagagggaagcaagtttagaatatttggagaaatcagttgattttaatgcctttgcagcagcagagatgatagttgaaacttcagaagcatttggagaagtaacagaaaagtagaataagttggaaccttcgtaagataaaacctttgaatcaacagttgctgagaaagattctggaactgatgaaattaaacctgcagcaactaattcataagcggatgcatcttcaactggtaaaccaataacagcagaagttttacctgcttgtctaattcttgattctgcaccagtgtatgttggttgtttttgtgcaataacatcgttaccctttggtaatgaagcaaattttgattcagagacgattttttctaaatctgctgcattgacattttcaccaatgatttcaacgttttcagagaggaatgcttcctttgctaaagtcttaatatcttcattagtgtatgattttgaaccatcgtagtataaaggtaaaccaagaccggatctataggaaactgcatgtaattcttctaaagctttaaattctggatttgcggattcagttgcgtaaacttgagatgcgtaaggacctgcaatttcatttaattcatgtggtttgtaagcagcatcagaaagagtggatgctaatgagttaacaaagaatggtaaagattctttaaggaaagttgcttttaagacaagtgcatctcttgtaacttcagcagagtattcaccaccaagaagttcagcttcacgcttgagtcttaaaccagacttttcagtagtatcaaggaatgcggaagttgaaagaaggtgtgctaaacctgcagaagcagattttgaacctgcattcttaacaacaacttttaatgaagagactgattcaacagcgacaggaacagtcttaacagaaacagcacgtgcagcagcagaggaaaaatgtctagcagatgagaacatgattggtaattgatgtgttgtcaaatgataatatactcaaagtttcaaaggtttatattcaattcaattcaatattaacatcaaatttccataagacttagaaattctcactgtaccactattagcaaacaattttttggcaattccgcgactctgattggttcctcttttagaaaaaaatggggcttcccaatggggaaggtgcgcagtgtgaaagcatgaatttttacaattaaaacaggaattatttttttcttaattactcttttaggaagtattatgttagataatatatttacacatttttaaaaatcatcaccaaaccagaagactccacccatcgctctaagtctttgaaatttcgctaatgcagttttctcactctccacaacttcttttaattgttttaattcactttctaataacaactcagcttcacgtcctcgcacatcctctctactgatcttatctaaaagaattctgttagctgatttggtttgttcaagttgatctaatgcttcacccatattaaacatcaaacatttacctaaaatactacgaccacgcaaatatttcctgtttattttaaatgcgaaaatacttctcatagcattacgatcagcagtacgtggaatttcttgaatttcaacaagtccaaatttagtcaaagttgcaatgatttttctaacatcaccttctctcattaaaacaaattttgcaatatttttctcttcaatcaatcttttaccttctatacaattcaagactctcaatacaccgttacccaaaacacctttgattaattgtttcatttgatagtctacaacttgcaagcgtaattctgtaaatggaacatagaaatgacctggagtagtttctcttaaaaacatcatctttttatcagttgttaataatttcaaatgttgtagtatcaacattaataactcattgttttctgagttatttgaaagatcgaacccgttatctgcattattttgattttcatcttcgtcctcgtcgtcatcatcttcatcgtcaaatttaatttgtgatgccagtttactcagtttagaacgtttagcactattaccattagcattatcttcttccagttttcttttcttggcatttttttcgtattcatcatcatcatcattattgattgttccaatcaaatcatctctggtcagttcatatttattagacattgataattcttttaatatatcagcagcaccaaaattcatacctttttgttgatctactaaacttaatcttttctttaattcttcgcctatacttggatcataaccggatgtagatgatcctcccactccgacacttacatcagcaacaagtttatcaacaatattttcaatacttctcacatctctagattgtttttcaattctgttcaatacaacttgataaattaatgcagtaatattaccaattctatgtttacaaattgagattaattgagtatctctttcatattttaaaaatctttcaaatgataatgttaatggaacaccaccattcaatcttttcaatgatttaacactatttgttccaccattattattatcatcatcttcatcatcactaaataaagttgaaacccctttagctatttcaatatctgcatcattcatttgatttctcattccagttttatgtaatttatccttaccatcattatcaacaaagattttcaacattctttcctttgctaaatctttaataataattgattttttcaactgactaatacctgcagttttaaatcttggattacctccgccatttccaccatcatcaccagttttcaaatattgttgactattattagtaaattctctattagcatgtctaacacattcattcagtgtctcaattaatggtttaaaatcaaaatctttaacattaactaaccatttatcatcaactaaatcaacaaaaacttgttcaattttttcaatttcactctttaattgtatctccttaacatacgctccaattgttaaatgaccttttaatataacattttgtataacttctgcatgtaatttactaaatttcttacgtacatgtcgtataatatcatcaaggtatgttaatttccaacaaccttcctcattatgtgaataaaatacattgccacttcttgaatcagtaatatatacaacacaaccaagttgaattagtacaactaatatttttttcaaattattacccttgattcctgatttttgtgataattgttgaattgaaattttacgatgtgcatgaataattgagtaaatgtatgctgcttgttctccaatataagctcttagaattacagaatgaagaaaacatgatggtgactgtgtttttgccattacaggcaattctgtgggaatcttagtaccaccactcatctttgcttatattacagatcaatgtaataaatacacagtaaacacaaattttagaagtgatttcatgaaagaaaaaaaaaatttggaaaaaatcaaaaaaaaaatctgagggtttgactatagaaggaggcatagaaatgtggttgttgctgtgttttttttttgttgtttttatatattttatataccgttttttatttttatagaattatataacatagcccttggttcaccagttgaacagaaaatgcattaatatttattatgtgtataggataggatagaaaaaaaaattgggtttggtatggtgacaaaactgaaaaatgcaaacactaaagaaattcgatgaaaatatatcatctaattggtggcatatcactcatttcgaataacagatcatcttcatgataaattccttgatgttctgcttcttcatcatgttcattgctattcatttgtggattgtatttaatcatatccatattcatatttctgggtacagtattagcatgatgaatactattattattgaattcatcttctataccttcatcctcagaatgtaatctggctctaccagtattgaaactttggcgtctttgtttgtttcgcatgttattgagaatattgcttaatgatcctctggttttcttagaatcatcacgtaacataggtctattttgtggtttgcttggtgaatcatcaatctcatctttacctttaataacatcttcttcatcgtcatcatcttcatcatcgtcctcttcttcactttcaaaaacttgttgacaatatgacatatctttcaactgatctggagtcatgttgcctgtaatattatcactagaattacctttaacttgagaacttaaatgacttctttccttaataccttcattcttgaaactattttgtaaaattgtacgtaattgactacctgttattgaacctcctgaaccagttcttgatcttgaaattgcattaacagatgtagaatttacactaacactcagacttctcaataaggagtgagcacgaccaattgaacctgtacgattgagattatttgcttgattaaaatcactatgattggagcctttgaatattgatgatgtaggagatggtgattgatagtgaggattattggtagcgttggaactagttttatcagtactattattgttattattattcatagttgcatcaatagaatttattcctgtagcaatggcacaggatgtacttgaaactgtgctagatttaagatgagaatgtaatgagtttgctgtaatatgatttggagtacccacaattgagttaggagaataagatgttgaatgttggataataccaatacttcctctactatctctactacctctgctatctctactattagcacgaactcttgaatataaaccatcatacattacattcttgtctaaagatccataatttgtagaggagctattgtttgctatattattacttggagattggcttcgatagaagttgattggagcagaagtaacataatttggcttctcagatactgctagattggtatttagatcagatgtcactgggtattttgtattcattaataattttgcgcttgactcaatatttctattcatttgatgcggtggtggtgaataggaagatggtgatctcgaaagtatcatactatctttagaattgatgaacaaatcattattctttttcaaatttttgtaattgctcaagttgtcatcatatatcattgaagaggaattatttgaaatctttaaatcaggtttagaatcaagaaatttcataaacgttgataaatcttcatccaagaataatgggctattagtttctgaatttgtatttttgatagtttgtggttgaatattggtaagtttactgttgagattatttgtcattaattgaccttcaacactgttatttctactggaactatttttgaatcttgatccaaatgatgaaggaaattttgatgaagaggaagttatcagtgcagcatttagattagtagcactatttttgtccagactaccattataaaaatgaatactggaacctgaatcatttcttttcacgggtataggagttgtgttgttataggggtaaatattctgtggtggtgaagaagatgcgacggatccagatttaaatatagagaccgatctaccggatggtcttcttttagatgatatgctgttaattgaagtacttgatgcacggaacttaacattgcctaaattagaagttggtgaatattgttgttctgtaaatgaaggtttttttgattgagaagaattacttgtggtattatttttatcattatcttgaacagctgtgtttgcagaagttggagtaattgtactcgtagcaaaagagttagccttctccttttgtttttcaaattggaaacttagatctggatgatgagcatcatatgtgaaatgagaagttgtttcataaatgtgaaaatctgcattgcatctgtaggataccgatatctctaaagctccaactggggtaattatagattgtaattttctggaattaattgtatctagttctggtttataagaaattaaatgtcggctcagaccgtaacgaccttttgaaatcaatggttctgagccgttcagtatttttgttttaaatctaagtttggaattaattgttttattattttttttgaaaaagtgagcaactggtaatgatgttaaaaccgtttgaaggcgatcaaaatttttagtaatatttgaactgatgacagttagatccatcatttcattatcatatgtttcaaggtctaaatgaaccaaccatctttccaagacaatttcagatttcttctttctcagtatgagttcttcttcaatatataattcctgagaatcctcaagatttgataggtccaaaactgtttctattatcattggtggcaaaattgtgatatcacgattagtccatggctttatcacgtctctataagtttcatcatcatcatcccaaggtacaacaacatcaagccatgaatcactatcttcaatttcatgaacatgacccatttcctcatcaccgtgattcaaacgattatcagtaatagtctgagccgaccttgagaaaaaccctcttatcatctcagctaacgcgtcagcgtcaccatttgaaagccaccgggacctcccctccttatcgggcattatagatgggttatacaatatttatattgtttattggaaagggaaataaaatgcaaaagtttaagaagaaaagtggtgtatacacacatcaaaatagaattatgggatatgagcctcagtattatgagtcttaaatttagaaccctcgcacattccgtcaaaagaagttttgttatctaatcagagacacagcctggatttggctgtatacgatgagtttatacagtatcttatcttataaatacttctaaattctatatattttataaaagacatccaccaccattgagaatgagtgctctctgggtttctcttaaacgaccggaggctgcatatgcctcactgacagaaactgcggattctgttttagaatttactgctaattcaagagaaactgtcttatcaagatttctccagacgttgacatcacctggaaacaaaatggcctgtctttgccagagttttttaccaactttgtctaatactgacagaatttcaggaacttccttatgtgtatctgcaatcaatgtctcaagtggtaattgttgtaaaacttcttgaactgcttccatgtattctgaccattcctctgacaatgacattgctgcaattgtaatacaaacaacgagtgatgtaccatgttctgaaatatgtgctaataattcgtctaatgcagcttgtctagtttctgtatcatcaaatgcatataaaacttgtgaaactaaaacaacaatattctcattctctgggaatgcatcaagtaatttcttaaattcaactaatgatttatcaaattctccttgaaaatacaatgataatcctaaaacactataacatgaaagtaaacattgttgaacttccaatgttaaatcttcaacaccttcaattaaaacaccaatttcttcacaaacatcataagcaactttatattgtttacttgataataatatacgtgaatgctgacatttagccttacaatatctaatcaaattcttttcactatcattattttcatattcatcttcaagtaatgaacataatctctcggaatatccaatacctttattaaatgaatataatctttcaataactagtaaacttaattctaaggcaaattcgtcattagggtataacttcatataattcatcaaaccataattaactgtagttaattgttgaacacattctaaatctctttcatcatgaccttctccaattattgaatcaagaacagaaacagcgtataataaagtattagccggctcacttcccttagaaagaacataggaatgtgtaaataaattattagattctaatgtctttccttcctctttattaattaatgcttgtccaatccatgcaattgaagtacccgcagcaagtgattgacatcttaagaaacattcgtttgcaagttcattatcaaaatactgaatatataacataccaagattaaaccaatatgttggtgatttagattcaattgaaattgccttaataaagcaatgttgagaaattttactattctcatccattgttaaaattcccaaataattccagtattcactattatcaggttctaatgaaatcgctttatttgctaattttatagataattccttgtatttagcatctttactatctttaaaccatgaaaagaaagaaactgataagttgaatatcaaactggagttaagcatacgtattcccttctccttaccagctaaataaccaccaatacatgataaagtgacaaataaatgtaataattcaacatattttcctcttgcaatcaattcaggaatttcataatcttcagccttaaactctccccataattcacctgattcaaatacatctttattaaaaatgctgctgattttttcatatggtaatctttcatttgacattctaattttaagagcaactgttaatgcatcacctaaacatttccataacttgattgatttattttcaagctcaaatgattccaataaatatttaaatactaccaataatgtatctgatgctctcaaaattgcacccttattaatttcagcattacatctcaaaattaatgtttcaattaataatgtcaaaatagagatgttttcactctgtgaaattaataaattctgtaaaatcaaaacacttctttcaaattcaagcatacttgttaatgacgttgctaataaatatacagcatgccaatcagcattattttccatgtcacttgtaatttcagcttccttatcatcaacattatttgctaatcgaataacatgttcgaaaactttaacacttgcttctaatctaccacttgaaatatatgattcacctaatccaatccatgaagtaatatcaaatgaattcatacgtagagcactttgaaaatattcaattgccttagtatcattttttgcttccattgacgcacaacctaaaattctatacggccatgatttatcttgtactttattaaatgatgaatttaattgtctcttagctgattcattttcaatgactgctttactgacaatatctgccatttcccaatcatcaatagatgtgaaatgttcagctaatctatatgatgcctcaatttctgcaggatccaattgaaatgctttgtaaaaacatttaattgctctatcttttttattagagtaattatagtacattataccaagtaaagtaaaagcagatgcataatttgcagatattttcaaacatttcaaattgtattcaatacatttattcactaactctttgattttctcatcattatcattagaattatcgttatcaagctcttcaatttcaatatgatatgagattgcttgcctgtacatcaatttagaaattgtattcattaaagtagcactacttgaactgttctcttgatttgcatcttcaatggtttgaattgccttttgtaaatattcacgtccaatatcaaaattcttcaattgaatttgacaccaaccgtattcttgaatagcatttgtattatttgcatctttattaatcagatccataaaaatatgagatgcttcttcaaatttatttgtttcaactaaaatcaatgctttaccaattctaattctatcatcatcaggatatttactttcaatagaatcatataatgccatagcttttggaaaatttttaggagattcatagtaagtgtaaataattgctaaattcaaagtttgactcaatttactattaggaatattcttggatgttttatatttcaaatcaacagttgctctagtaaattgtgtagaaatatcaagccccagagcatattgtttaagatgaatacaatactcaagcataattctattacaaataattgaaaaagtatttttttcaattgcattggacattgtagttaagatttcctgtggtgaggcattaaatatctcatatctttcatcttcttcctttgtttccttttcattttctttatctttcttttccttagttccctttttaagcggatataaataatccaaaaccctagatttttcgaatggagaaatatcagaaatcaaaaattgatagaaaatactaccaaaacctctctccttaccaaacagtgatatataatttgacaaattatctaattctaaatcattcaatgtagttggatcaagccaatcaaagtatattttccatgctagctcagaaggacatttagttaataccaaaccatcaacaaaatcacttatttcatctcttaatgcaggtttcttgggtgctggtgcagctgttaataaagaatatttatatcttagaagtttgtcttgagcagaatatctatcattatcattatgttccagatttatcattaattcatataatttagatatttcggagcctgaaataattggccataccgcttcattatatttatctaattttgccttttcagtcatgttaattgaaaacttcatctttactttatcctttgtctttttgacttcactattttcttcttcttcaattatactaataagtttcttcaaagaatctgaaggtttcgcaatattgtatcctataatatcacctaattcagataatccaggtataatttgtctataatagtatttcttcataggtgtaaaattcaagccatgttctttaatatattcatctatgtatataacaacttcggtgaaaggttcgtttttagattgtagtaatttggcaaatttagtcaaggtagtgaaaaatgcaacaaaatcagaatctttatgttgaattgataattgagctttccaagataaaacgctttctgggtcaatttcgcttgccttaatgtaacatttcattgcttcactgtcaatcctctttgattgatatgatttacctgcaaaaatgtatgcaaaaaaattagatttgtccaatttgaaaattgatttacaaattgacaaacattcatcataatcttcattaacaagctctttctttgcttgttttaaataagactgtattttctttttagcttccttgtctgacattgaagcgtttccctgttaaggcagtctataacggccaaggcaaagtaaaagaagacacaacttgctccaattgaaacctccatgaaaaaaagtagcagtgggccttgaaatttgacatgtcgcgttgaagttgacccaggttacccagtatatagccaatgccttccttgcttggttctctcttggagatcaagagaatgagtgggggaaacaatgcaatggagttatctaaagatcaaatacagaaatatagaatgatgtttacaatgattgatcaagatggtgatgattttataacgaaggatgatattaaggctatttttaaggatctaaacatggaaattgatgaatcaacaatcgatcaagaaatgttagcaaatagtaatggtaagttggacttcaatgggtttttaaacgttgttaatcagaaaatcaaaggattcagtgattcggaggaattgaaggacgctttccaaacatttactagtgaaggtggtattgatagtaaggtattaaaagaaagtttacaatctgctcttagtgaagaatcagataagaatgctgttaatcgtgtggtggaggaatataccaaggagaacaagattacaggatttcagaaattcaatgctgataagttcattgatgatgtcaaaaaataaagacatcaatagagtatgttatattctatatgttaacaatttttataaacattttagttgctttgtttttttctttttcttcttctaattacttttgatattatatgttaaataatagtattatactagtgtacaaaatggatggggttatctgtaatatattatttttaattatattatcatttttttgttctttgatttttatagttatctaatcgacaattaattcatcaacactccagtcttcatatgaaccatctggaaggtatcttctaacaacaaggggaattttcttagcagataattctttcattgcgatttgtaaaggatcagtttcaccttcaatatcaaccaatacaggtgcattcattgatatttgtaatgctctagtacctaaaatacgtgctctttcatatttagtcataaatggtgtggtgattctttcttcctttggaatagctcttggtttagctcttttaccaacttgtaaaggacctgatccattatcgtcgagacctgatgtgatgattaatcttccgtcttggtcaacttgagtaccatcgttattgttaatgacatcatcatcattttggaaacgttcatcatctgaaaaacgttcatctccaccataatcctcaccgtagtctgccatgctgtgtatctcttgtaggttatgttaatgaataactactataacagtaacaagtcgtcttagagagagagtggaaaaaattttcagatttctgtgaggaacatgaaattttcagctttttctttttcttgctgtttctctattaggaaaatttaaatttaaattttttattatatttttattttttagacttatctctttgttggatattgtctgattagtacactcacccgttggaattgtgcgttggaaatttgaaaatggacatttcatatttgttggaatcaagtaaatccaggaaaagaggtagaagttgtgcttcctcttctgaaatgactatatctcctgtaaatgaaattcacgataaggatgaagaaatatcggcaatatcaaattcaaaccaaccaattgatcttcctaaaccaattgaagaaactggtaatagagaaaagataatcccttcaactccaccgcgttcaaggtcacactcagcatcttcatcgtcattttctcaacaaatgtctccgagagtggggagacgatattctaatacatctgcatcatcaagatctacatcaaattcaagagcttcatcaccaagaccaaagaaatatctatgtgaattcccaggatgtgaaaaagcttattcaagaccttcattattggaacaacatttacaaactcattataattatcgaccttttaaatgtgacttccccgactgtgaggagacatttgctagaaaagaccatctggaaagacataaacttaaacacttaagtgaggaagagaaacctttccattgttcattttgtggtaagggagttaattctagccaacatttgaaaagacatgaaaaaactcatttaaaatcatttgaatgtccatatgatgattgtaatgaagcatttcataaacatcaaagtttgaaggcacatattcgtaattttcatgaacaaattacaaattgtcatatttgtaaattatgtgacaaaaagtttgatcgtccaggtagattggcaaatcatatggaaaaatatcattctgagacaccaaaactaatgtgtgatttccctgattgctataaaacttttagggtttggtctgcattacaattacatattaaaaatgatcatcctagacttgaatgtgaaatttgtggtaaaaaatgtcttggtcaatcaggtttaactaatcatatgaaaattcataatgatgaaactgtattaaaactttggggatgtattgaatgtggtgaaaagtttccaaagaaagatgatgctgttaaacactatgctgaaaaacatccattaattacattaccggaagagttacaatatgttatcaaggaagaaaacgatgaaaagggtgagaaagagaaggaagatttgattccattagatgaaaatggtgaaaagaaaacggttgagtattatatgagaaagaaggaggctgaaagaaaggaaaagaagagattaagagaagaaatggaacaacagcaacagcaggaagagaaagcgggagtggaagtggaacaacctgaaaccagtggtcctattaaagtagtagctaaaagcaggaaacaaaaggcagttgaatcatttctatctgaatgtggaatagttgtttccaaaccaactacaagtgaattcaaaaagcagcagttggatagagtaccgtcatctcctgatgttttagatatgcttatagataatattgaacaaagactcacttgtccttacgtttcctgtcatcgactgtttaggaaacaatatgatttggacagacatcttcaatggcacacaaaacaggatgaaattatggataaaagagttgacgttatcctatccgaacttgacagtaaatcatcatcatcaccattatccagtaatacccctactaataataatgaatgattgtagtttgctttttaaacatatttcattgtttttatatattatatcatgtatattatacattattgtacactaattaactaactaatttggattacttttggtatcttgcatttgcttattatgtctttccaatttactattgaaaagtctatttttttcatgaattgcaccttcttttccttcatcagaaatcttttgacgtttattataaaccttctgttcccatttattgactttatcgatatattctttcaatttttcatttgatgttagggcacttcgtatttctgcatctgacaatccttgtgctttcattgattcatactccttcttttctttttcatactcttcaatagtctttctcttattttcttcctctagttctctaatatttttggagtaagtattagctgctagttgtttgtaattttgtaattctccattatcggtatcaactgattcaaaatgtctctttaaattaccttgttttatttgccatttatcgtcttcctcagctgtatattccaaagctgtaatatcagaaagtttactcttctctttcactataggtgtatcatcattcagtgaaccaccttcttcttcttctctgtctgctaattcctgaagtttcctcttctctgcaagtttcgttcgtaacccactggcttcattatacacttctcttctattatctaaaatagcactggccctttcacgtttcagtctctctaccttctccaacaggctttcacttttctctatagatgtcattggttgatcaactttaatgaataaaacacttaaaatatgataaaatcaatgctacaaattttcgcataatttattatattgacagatttatcgatatacctttaattcgatgtctaaaatcgttaaatagtacataaaagattaaatacttatataataagtacaaactaaactgttctaagctttctagcacgagacttttcacttggtgttaaaacccattcaattccactttctgcatcttcgaaaatggccatttcttcttcatcctctaatcctacaactaatacaatctgtgtaattttaacaaattcggatcttaatccgtagttgaacttacataattcactaatgatagtactaacatcttgttcaagttttgtagatcctgcagaggaaactttcttctctaattgccatattttattctctaataatacaatagccatttcaattattttgacaattaatttgttaaatactggatttgataatgttgtcacaaatggtataattatggaattccaatttttaataaatgcaatcatattactatcgttttctaaaacttttgttgttctattcaaattattattcactccattagcgttgttgtttatattattattgatttcttgtctgaagtattgaccatcttccattgttaataagtaattactattcaatgaactgtttaccagttttgttattctagatttcaagactttttcaaaaagaattttaacactgttattaattatggaatctgttctttccttgaatgcagttggaacactacccaataatccatgaatcttctcaaacattgaactttcatctggtacatgaacatcaaagtctttattcagcaatttattagtatctgataaactaatagttttcctgatattaattaattcttgatcattcattatcaataatgacttcaaattactacttttcatacatgattctaccaatttgtctaaatacgttcccattgcttgcaatgtatttaaatagataataaaaggtttaatttccttatcatcaccgataaggtatgattctgtatcactatccccagagacggtatatgaaatcgcagcattcaaacctctcatgaacattgcaccagtattggcgatatccgatgctgagacattgattgcattaggtgttccacttctcgatcttgaatcgcttgatatgtttttaatttctttgttatatgaatgttgatcatttggtttatatattgactgtattgtttcctttgtaagtaaatttgaatttgttctcaatgataatgatgaaagtctttgtttaataatatttaagaagtcattaagtaaaattctctttgtatttgatatcatgtttttaatagatgctaactcacccgttgctagaacttccagaaatatagtattgagtacaattaccatatcgtcagctaatgatgaaattggtggatcttcgggtatcagtgttaataatgaatttgataatgaattgttggtatttttatatacttgagtcaaaaactttaaacaagtggaaaaatttgattcaggactattcaacgattcaattgtacatgctttctctaatgttcttctaattatgtaagtacaacttgtatcaaaattgcttacaagtttatcatgaacttttataccaaatgatgaaaataataatggatttggataaattttttcctctaaattatttgaatttgaatttgaatattcattccaaacaacaacaaaaaatttggaatacattgaccaatggctcatcattgcagataattcatcggtaacttgtgaaatttcctttaattctgcagatgcaactatttcttgttcatcttcctcttcctctgattcactttctgctacgtttctataaatttcctttattaatattggatagctgtattgttttaattcactgactgttctttctaaatgttttacatctgaataagtttcaaatatcaaattactttgtaaatcacattctacttgaatatcttttaaaatacttggaacaacatctttaccataataagattttataacttttgaatgttgattaataatcacagatagtgtttgatataatgtgaataataactgtgcgtatatatctgtttttgattgattgttttgaacacttctgataatatttctagattgttcacttattataccacatatgaaattagagtaacatttcaaaccaatttcttgtttcccaataagagggaataactgaaagaaataagtcaattgggggacatccttctttacagctgcattattgaaattttctacaaatatttgctcaagctcattgatccatctattcaataaatcttttggtaaatcttcaagtgtacttgttggaactttaaattcaacatatggatcagttatcaaaccatccggtaattctctaatagtaaatatggattttgatgcagataaccaatctttcctttctattgctaaatgtgtgttgtttagttcagttttcaatgttttcacattatctacaaatgttttaagtttgatgagttgtactttctctgaatctaatattctaacattttcagtgattttataacttaaagaatttgcattttccatgatacttttcaaagatcttgattgattcaatgttgatgaaagttcaactcttgaaatttccaatgatctgatagttgactgttgttgaaatatattctcatttgcataattttgtagtgttaaattgatatcatgttgtgtagtatttatatcatttaaaatatctgggaattgttttatatttgatgaagtatttagtgaagattgtaaagatttgattttattagataatgtttccatttgtgaatcaaaatcaaaatcatgatctaaagatgatccattttgaagttcatttatagctaattttgacattatgaacaaccaattatcaaattcaaaaacaaaacactataattccccaataacaatggattgcactgtctatcaaaccagtgataaacctgtttgttgtaaaggaaaccgtgttgtcatcaaatcgataattgaatctcgaacttcaccaattttcaaccttctctcttcccaatgaggtaatgttggaattttgaaaatttttttcaatttcgacacttttcattatcttattaagagtctgtttttttccaactttcaacaacaatatagccaataacactagtacaagatgactactgttgaaaagattaaagccattgaagatgaaatggcgaaaacccaaaaaaataaagcaaccgaaaagcatcttggtatgcttaaggctaaattagcaaaacttagagctgatttacttaaggatgcagctgcatctaccggtggtggaggtggtgtaggttttgatgttaaaaagagtggtgctgcatctattggttttgttggtttcccatctgttggtaaatctacattattaactaaacttacaggtacagcatctgaagctgcagcatatgaattcacaactttaacaaccgttcctggtgttattaaatatagaggtgcaaagattcaaatgttagatttaccaggtattattgaaggtgcaaaggatggtagaggtagaggtaaacaagttattgcagttgcaagatcatgtgatttaattttcattgttttagatgttaataaaccacttcgtcataaacaaattattgaacatgaattagaaggttttggtataagattaaataagacaccgcctgatattcttatcaagaagaaagaaaaaggtggtattagtattacatcaacagttgcattaactaaaattgatgatgatgaagttaaagcagttttaaatgaatatagaattaattcatgtgaagtttcattccgtcaagatgcaacagttgatgatttgattgatgtccttgaagctcataatagaaaatatattccagctatttatgttttaaataaaattgattcattctcaattgaggaattagaacttttatatcgtattccaaatgctgttccaatatcaagtgggaatgaatggaatttagatgaattattagaagttatgtgggatagattaaatttggttcgtgtgtatactaaaccaaagggacgtttaccagatttctcagatcctgttgttttgaaaggtgataaatgttcagttgaagatttctgtatgaagattcataaatctttaattgatgattttaaatctgcacttgttttcggtacaagtgttaaacatcaaaatcaatatgttggtttatcacataatttacaagatgaagatgtgattactatcttaaagaaatagaaatgtggatttctggttttactttactattcttggtttgttgtaaataatgtgtatataagagatattggtccttttttttaaaatgtttacaaaaatagataatatattgtataagatatttaacttaactttataactatttgtttgtgttaccaccaccattactattactatcagtacttattacactcatacattggaacttatttgcataattagccttgtataatctaatcaaaccatcatcaccacaactacttaaaatagtaccagtaagattccaacttactttccaaacttcaccaatatgatcattaaatgcatttaataaagtaatttcaaaatttattttatcaacatcatctaaatctttcttttcagttaatttaaatattcttacataaccatccttacaagcagttgcaattaaatgataacttctacccatagttggagcccatgaaacactccttattaaacctttatgttcaggtaatactaaaccttgaacaaatttattagttgtttcatttctataataaatataaccttgatctaatgcacttacaagaaatttctcagtactaaatttagatggacaccatgataaactaaaatcactttgtagatgatttgcaacaggatttttcagaattgaaatttcatcaattagtacccattgagataaatcacttggatcagctgattcataaattcttaaaataccttcacttccaattgaacttattcttaaacctaaatgtgaaggtgtaaaacatgcatcatataggggaccatgagaatctgctaatgttgcaactttagtccatcgtctacctgaattcaatggttcctcaaaatgttcctcccaaactttaattgtacgatcatatgatgcagataatatcagatgaccaaattctggatgtgagaagcatactttaacaataacactatcatgtgctctccatgaatcattaggttcccaaaatgaagtatttgcatctaaatcgaaaacttttatatgttggtcagcactacaggtagctagttgacgaccatagaagtcataggctacatccagaataagatcttggtgagaggttggaaaaggtttcacttggttcattgtgtgtctggtggtgcttactctctgattatataaaccaagattcaacttcgtccaacaatataaaactaatcaataatgaaaacatgtaccaaacacaacagaaaaaactgtcgcttagtaaaaagctatacgagataagaagagctgaaattattttatttttcacttttgttactttacatgttttcttagctatttaaagtcacctgcatgtccttttctcttccttttatctccccgatttgttgtttatatacttctttttcttaattttatactctatttatactaccggacaatattgacaatgtttaaagttttctcacctatcaattcactccttaaagttaacaatttacgttctattcggacttcgatccagtcccaccatataaacggtaaaatgttttcaacatctccaattactaaaaagcaaggttttaataactttggtaatttcaaatatcaatcaagatcttatgcacatcaaagagagagacctaatatgggattaacattcttaggtgttttaggtatttcatcattatacttagttgcacataaaccaattttaaatgatgcaggatttgctaatcctccagttactattaatacaggtaaaggtgcaaatgtttattatgatgatactaaaccaaaatttgatggtgcatttaatggtaaattaaattatcatcaagttgcaatgggttcaatggctggtttgattcttggttatgcactttcaagattaagttcaattttatttgttttcacaattaccttttacgtgataagtatttatcttcgtaaacaaggaattgtcgttattgatactaaaagtgttttcaaaagtgcagtaaatagtgtctcttgggatgaactcgttttcgatcaaactagtttcagtgtaccatttgttatgagtttcttaaccgctgctacattataagttagtcacaaatagctttaaataactttaaaaacactatttgtctactcttatttttattttccattcttcagtctaaaaatatatcctcctttttacatgatacttgttttttttttcattattattatactttttatctattttaatgtataaatgaacaaaatattttacaatacttgataacttatggttacaatatatgtctcacatacgtttattgagacatcttctctatctataatacaattggtggaaagagtaattaactctacgttgtttgaacgatttcatcaattgcccatttgacaatctctttgaacaattcatcatccttattctcatctaattcatctaaaactgctaaatcatcagtaaatgaattgaaatcagataaatcttcattaacttccttctttattgaattaatctgttccattagtttattattactatttcgtaattcaattaattcttcctctaatgttttcaattctttctttttacttgttattaaaaatgctttagataattcatttgatgttaatttagatacatctatacgactaactttacctccattctttatatctatctctttctgtcgttcacccttatcaacgatatcatcaagttcatctaatttattcttcaagtctcgttcaataaatatcttttgaaactctaattctgctctatttttccaagatttaactatttgctttcgtacataatcaagacttacatgatctatttgtggataacatgaaacaaacgttttaagcgtgagtttagataatgttttctgaagtgcatatgaaagtgcagaatgtaatgcctcaaatctcacatgatctttctccacagacattatattgcatgtatattatttatttgatactaaagttgaaagtaatgtaaccagtcttccctttagtataacgacaacaacaacctcccattgcatgtaaacaaatattcaaatcgcaactactaagtaaaatattttttctttcaacatgaaaaaaaatttcttgatttttttctactataatctttcttttttaactataatctttcttttttaacaaggaaaaactatagataaaatgaagattgttgcatcctgtgaagatactggagctttaaaagtagtcattgcattacacggaactgatacttcattaaaacctgatgaaaatagcgcaaaaattccagctccaatagtttcaacttctgcaactgaatataatagaaattctaaagttatacatttagttcattctcagcatactggtaatattgttgttactcgtcaaaatggttctgtagaattatatgatacatctgttttaatggaaactgaagaaccacaaatcattgaagaagaaaccaagaatgaaggtaaagatggaaatgcaaagaatactaaagaacaaactattgaagaagaaaaggaagaagttgatttattaccaataatatattcacataaggatgttattcctgcatttaaattaacttctaatgatgaaaaatttattgctttaattattgatgattcaggtcgtgttgttgtagcaacaaacaaaggttcagttttcatttggaattcagaagaggaacttaataaaactccacttaagtataacttaccattaaatgaaactgaagttgttgaagcttttaaaatacatccaggtaaagaaaatataaattatattgcatatggtggtaaggaaacagatttaagaatcgttaaattaccagaagttcaaacttctaaatcaaagaaatctaagaaatcaaaaaaatcaaaggaaagtatagaacctgaaattgaaattgtcttcaaggctaaaaatattacaaatagtacattaaatttacgtgttccaattcatataaaggatattttatttgataatgaaagtactccagaaaatttcaaactttatacattcacagtttggggtgatttacgaatttatgaatctaaattaggacgtaaaccaagatcttcaactttaatcttacctaaaaaagcaccaataacaaaagcaatactattaaatgatcatatcattgtttgtgataatagaggaatagttgtaaaagtcgataaacaaacaggttcacaaatatgtcaatttaagggacaaattggttcaactcaatcattatttaattttaatgactcaattttaggtacaacaggttctgaccgttatgttcgtgcctatagtgatgagactagagattgtattgttaaagttttcatcagtgcacaatctaataatattgtaattattgatgataacgaaactttaagacgttctgcaagtaaattaatcggtggtgtaaaggatgttgtatcaagagcagaaatgagagaaataagacaaaagaagagagaagaggaggaagaagaaagtagtgatgaagaagaattatggagtaaattagaaactgaagttacaactagaagaaagagaagaaagttaactctagcttaattttaaaatgacattttttgtaaaaagtttataaaacaggtatagttgaattacttacttaatagttctcctgtttaatcatcatctcatagattagtgatctttttgtacaggtattagtttaaatctcttcaattaaagctttgaatcaaataatttgttagtaatatagctgttattagtaatgttcctacaaatcttattaaagattgaaaaatataaacatttggcttttttcaaaaacgaatgatttgtcaaattttacttgatttagcctccaattacgtaagcaaacatttaattacagaaattttctcttgtttttgagttcctgtaaatgaacggatgcttgttaattcttatattttaattattacacatttgtgaattgttattaatgattatgaatgattatgaattacttatttaggaaataagattatttggaatactcgaataactaatattaaatatagaaatcatgttagaaagattataatagtttcggaatagattcgagaaacttctatcatccgcgagagagaaggttatgagaaatataaatattggaatactttcccaacatcaacatttaataatatcatttagagatacttccttaaaacatctagaagatcatctagtcgatacatagtcagtgacatagagaatccttatttatattacatagaaaagtagagagttacatttaattagattacatttatttatatttatttatatttattttaataagaactagactataacttaattaatactttattcaagtttaagaaaggatcggtcgttgttaactattacattccaattataaattaaagatccaacgacgaaccacgaccgttcactttcaattggtagcaccggtagtgttgtttaaactaccgtttttaaaatcaagagaaagaattagaatttaaatcaagtgttcaagttatccaaatttattatttcaaagttagtttacatttaagttcaagttattcaaaatacaaaattaaaaatcaatttatttatcattaattaatatttactatccagcaacattaaagactcaaaacaaattatttttattttttaattttgccacctaaatttattatttccattgttgcctatttattaatcattattactagaatttacaaatatcacatattatttacattagaatcattttagcaggaacacgctgattctacatattagttaagcaaatcaattattacattaatttattattacatttaaggcacactatatttttaacatattatttttaaggcatattacattcacatattttatttttatacatttaagagctcatcatgtttgctaatttagaagatacaattacttatagatcatacttttattcaggtgaaaacgacatcacgggtcaaggtgcaataaattttattaacagagtcaataaacatttttcagataaagaattaaaagaaggaaaacttcctgatgcatacaagatatactacacttataatcatttagaaggcaaatcattacgttggtttctcaacaagaattttgatattactacattaacatgggattatttcattaaagaatttgaaaattatttttataaagaagaacgtattacaaacaacaaggcaaataatcaagataattatactatgagatgcattaaagaatttttaaataacagagaccgtgacgtaaagcaaagaggccgtcacgagtaccattacaagaatcaatacaattataacaaatcgcatgcatacaaatataaagaatataattacaatagtttacatgcatacaattacgaagaatcatacaattataataaatcatatgcacacaatgaaacatttattcaaaagacagatttaccaatgcatcataaagatattaatagaaataaaacatctaaaagaaagaataaaacaaaggctactataaatactaataataaagaaacaaatgaaaataccatagtgaaattgcctactattattaatgaaaacttagaagtacaaaatttagaaaagaataaaaacctagaaattaatacaattgaaactaaagaaaagtccaatcacaataagaaatcaatatataaaaacattaatgaatccacaaatattattgcccatgaacatatgaatattaaaaacgtctatgaagacacaaatactatagcttatgaatctccaaacaattttgccttcaaatttgaaaatacttatatgaaagaacttaattataatgatcatccgactgatgaatctgaccattttactgctgatgaatctgaatctgaatattttactgcagatgaatttgaagaagatgaaaaagaaatttctgatttaacaaatacagttttgtctataaatactccaacaagtcctaatttattgaagctcagtgaaagtaaagaaaattatattaatcattttattaagttaattccagaccaattaattgaacctatattcctgccagtatgtcaaagctttatctcacaatttacctataatccattagtggtttcaccttacttaattgattatcgttataaaagaaagaaaaaatatcattgcttattagaatttacaaactacaatttatttaaatcaacattaatttaattacaatattataaaaaactatacttcatgtgaattttcaactcaatatttttacaatatctatttttgcacaattattaataatacttttatcatgcattatttccatcctattattaagattataaatttcgaattttcaaatattatattatttatcatttgtcaaatttaagtatttaatctcaacttaataagatctcaagattaacatttcaaatttattattaatcatatattattgcaatttattgttttacattgttacaaatttagatattaacctattagtgaaaatacacaatttgttcttttacctaactatcaaaacattaagaaatattatttttattacaatctattatttttcattatatttattatattaaaattttgccattctgatttcacgaatgaagagtctagtcataacattattttcaattgaaatttattattttattttatccaattattattttattttactcaattattattttatttgttacttatcattttatcaatcattatttatcaaattattattatattaaccatctatgaaaattatctttactctcaagtcaatatttatatgaattatcaattgtcccattatttaacaattagaacaattaaaatttattatgtcactaaaagaattattttatttagcaatcattttactacatttatttcatcaacttattaatatgtttgccctgttattacaccatcgtcacattataattacattattatcacatcattaacacatcataattaatatcgttgctaagttatatttttatctttattatcatcatattatcatcatattatcatcatattatcatcatattatcatcatattatcatcatattataatcatattattatcacattatcatcatagcattataaaattattatcctatttaacattgaataattccatatttatcaactgatttcgccgacgattaccattacattattctgatattattattatatgaatacttagatttttacaattaacatattgttacctgattgttactttatttatcatcataatattatttgaattatactatgccatcaaggtttcattattacatcaccatcagatctatattgttcttaaatcctattactaaaacacaattaaagattactttaaattatgtccatgaattattgatattattatgtccattaattaattaatttattattattaatatattatcattgcaacatcatttcaacatcatttcaacatcatttcaacatcatttcaacatcatttcatttattttatcatcattaggaaattatttatattcaagcaattatcctcattttatcatcgttttatcattagatattatcaatttaatatattatcaattaattcttagacaattgcaatttagatcattccatcatttcattaatccatatatttattccatttaacaattatattatgattactatctgaacatgttattatgatcaatttatatcaatgttactattaaatcattatgctttatcacctattatacattatgctcatttcatattattttaggattacttattcttattaatattaatgttagatcaataattatcattagtttattacatcatacatataatacaagtttatgtttattatactacattgtgattatcgtttcaatattatcattattttaaacgtatttcaattatatttacaagtattatattattatcatctcatgattattacctaacataattacaacaaagcattaatcacattattgtcatttcattatttattattaagcattgatgaacttatttatttgttgttgatcaaactatattacagtcattacaattatattatatttaaccattattatttccaatttaatcattttgtcaagatattattattttacttatcaagatattttcatttttatcttagagaaattattgcaaatagtgtctttatcattatcaacttttaagaaaattattatattatatttcagatgatcattattagaactattatttatttaactattgtcattgttgtcattaattatcaaagaagtctgatatcttatttcatctacaattattattacaattatcttcagttttatcattatttcgctcatcattatttttggttaatttactttctatttccatattgtctcacatattgaatattaaagttatgaatcaagatcaactatcaacttaaattgtcctataattttcattcaagatatgtagaagttatttttatttgaacttcgaggacgaagtttcccgagaagcgaggtaatgtaaatgaacggatgcttgttaattcttatattttaattattacacatttgtgaattgttattaatgattatgaatgattatgaattacttatttaggaaataagattatttggaatactcgaataactaatattaaatatagaaatcatgttagaaagattataatagtttcggaatagattcgagaaacttctatcatccgcgagagagaaggttatgagaaatataaatattggaatactttcccaacatcaacatttaataatatcatttagagatacttccttaaaacatctagaagatcatctagtcgatacatagtcagtgacatagagaatccttatttatattacatagaaaagtagagagttacatttaattagattacatttatttatatttatttatatttattttaataagaactagactataacttaattaatactttattcaagtttaagaaaggatcggtcgttgttaactattacattccaattataaattaaagatccaacgacgaaccacgaccgttcactttcagttccagttaagactggatggccaagttggttaaggcgtgcgactgttaatcgcaagatcgtgagttcaatcctcactctggtcgtatcttgcgggttaatggtctagtggtatgattcctgctttgggtgcaggaggccctgggttcaattcccagttgaccccttgatttttttttcttactggcatttttttttggtttggtgggaagatggataatataagattgatttcttttcttatgttttaaacactttctttcaactgacctttttttacaaaccaaattttaaatacttataggtagaatcagttacttagcgagtttatcaaaaggttagaaacgaccacttttttcaaaaatatttgtaactaagtaggtgataaatacactaaactaattgctactccgtaatcaacaataagctaagatttttggtaaaattttcctcaaggaaatattcacacaaaatacaaaggcaccaacaattattcttaatttcaacttatagcaatgatttatatcaaatgcttttagaattggtttaaaaaaatagatcttgttactaatagcaaaaaaatatattgaattgaggccaacaggaatcgaacctgcaacctttcgatttggagtcgaaagctctaccattgagccatagccccattcagttgttatttatccctttaagagctccgtgtaactgttttgtactcggcccagtcacgtgataagccttgaacaataacaaatgttaatttttgtgctaactattaagctcatatgatgtattacaaaataaatgtactgtgtaaaaaatatcgagtcatcaaatttgttcaaagagtagttactggtaaataactattgttttttatcacttttaaaagctttttttaaggaaacaaagaaggtttttattagttataaattatttaatctttgcaacaaacaaatagatcattaaaaaattaattattgaataaataaagtttcaaatgtagacaaaaaagatgattaaaagttgcacaactgtttagaataaactttcttatgttgtaatctaacgactctttgggcaggatccatattttacaaaacaacagtattaaaagaacaaactatatagactataaaataacttagattatacaaaatgtcaacagattcgatatcaaagctaggaattcttcgttctacttatacttagaattccaatctttactatcgtttctttttctaatttgtaacgtttctttttctgatttgtgagcaatacttaattctaatcagttttcaaggctcagcttaataatacaatattattatgtattatttagtttcgcttagaattaccaatctcaacatcttacactgaggttctgtttgaagtactaaattaagttttaccaactacataaataattaaaaatataagctttgtgacaaaagaatattgaagtttgggttggcactttgtttgtttccacagagctttaaacagaggtgcaaaattggttaatttaacacattgtaaatctgctaaaataagtctaatttcaaataccaaatgttacacaaaaaaaacgtgtgaaatacgatactatgttttaaaaataaaatttaaacaaatttttattcaagaatagaaacgcttacgtaagcaaagcaacatgaacaacttgctctagctttttcaaacacaacaagcgcaagtggtttagtggtaaaattcaacgttgccatcgttgagcccctggttcgattcctggcttgcgcagttatttttttagatcacttattttttgccatttgtccataaaatgagaaattaagaaaaatactgtataaatctgcttttcaatttttttaaaaagttgtgccatttatccatcgggaacaagaactccgcaatttttgacacatttgccttagtttatcctaaatttgactcaattttactctctgtgattgacaaccccgtttgcccgttttattgattattttttaatatcaaattaatataaaataacatgttatttcccaaactctgttaaagacatcaaattattagttttactatctcttttataatttcttttaaacactcactcaatctaatcaatcaataaattaaccatcttatatacaatgtccgttatcgttaacaacaacgcatcaatcgcaaacaaggaagatcatattactgtctatgacagagaaagaagaatctcaattactgaagaaactagtgatattgcaggacttacacttttaagtaagacaattagttttgaagatgattataatgatgatgaagataatgagtatactacatgttttgttccaactgttagttgtgatgatcatcaagatatttctgtgtacggacacagtatctattaattcatttactaattatgttactataccccgattataaaatcttttctactttctactttctactttttaatttctacactatattttaaactctttatatcttttatctaattaattaattccaatacttctcatcaataagtctattaatattatcccacactccgcacccccaattattacctaattaggcgatatctccaccccataaaatttaaaagaaaattttagtgccatttcccctgacactaattttcaaaatgattccgaaactccgagatcccgatgattcactatatttttgatgattctttactctattttctgtcaaccatgtccctaagcccttttcttaaaacaattaatttctccacggatcaataaatcacttcttctatttcttataacttttcctctttctattaattaataattaataatacttgcttaacttataaaatcattatcaatatgccacaagatccagtagaatttttgaaaagtcaatcaaagggtactttatcaaataccccatctctgagtaatttatataattcacattcaaataaaggttcagatacaacactttcattgtcaaattcagcagttttcactaatggaataggtttagttcaaaaaggtacaattgctcacggtaataagcatcatctaactcatagtaaacatccagataataataataacgatggtgattctgaacatgatacaaataatcatgaagaagacgaagatgatgatgcttttgaattaaattggactcctcaagtatcttctgataattacacttcaggttacattaacaaaatttaaatttgaaaatttacatagatttattattacaccttcttctaaacttttaaaatatttattatcacttaaatttgtattttctttagtatttagtttcttttttatacaaaacttatccaaaaaaataatgaaagattacacattcataaaatattaatcaaactctccccaacaaaaaaagtttcaaaaaattaagcccaacgcggggctcgaacccgcagccttttgattgctattggttaaatatcaatacttaagagtcaaacgctctaccgattgagctagccaggcttaaaagagaagttccgataccgggagtcgaacccgggtctgcccggtgaaagcggaccgtgatagccgttacactatatcggaaatcgttgtttttggtaccctgaaatttagtatactcttcatgaacgtatcacgtgactttgtagttttggaacaaaagatggagtttttctatttaaatatattgtacgtagcaggaaatgatatatttttttttgaaagtgtttaattttaattaaaccaaagcttttaataaaattattacatgttttatttgctcaaatacggagtatttttaggctatcttacaacattataaaaactgtttcagttggagctttggcaaatactttagtactgctctttttaacagcttttaaggcgttatttacgtggtaaaatgaacaaagcatttaaatatctcattattttattggggagtaatatctccaagccctacactttttcaagttaaaattatccgtaattacgctattaatttatagccggaaaacataaacaggttacatcaatcaaaagagaaacatgtttgtgacaatgaagtaaaaataattattgattgttgcacttctaaagttatattattccaaaataatacttcattttcccaaaccacccccctaaaaattttgtataattccaaacttctcattattcataaatgagcacaaaagcgcataaagtaacgttacacagacatacaatagaataaacaataaatacattttttataaacaataagataattttaattaaaaataaaaaaaaattgctatcataaaaactcgggatacttcgcttcttaattaggaaatagattacaaatctattttccaaaatgtcaaaggtgaatcactttctacaggattctttcaattgccgggaagtaaagtgtatttgtaatcagtataatctatataaatataaacctttatccacttaaaatatgtggtaactataaacttaaactttggttactctttacttctagtatacaaaaaacacttacaaatcagagcaaatgttaaataaaatcactaaacctttccactgggcaagaacagttgttcctttagaaaaaagaaatatatttgttgtttatgccgtcattttattaggtacagtccttgataatcttagttctgcatctgctttaacactctcagctaacattcaaaaagaatttaacactgactcatcaactacaagttgggttttatctggttatgctttaacattgggttcctttattatggtttctggtaaaatatctgatgttattggacctcataatttatatttgattggtattacaatcttttggatatcagctcttatctgtgcttgtattccacatacatcaattgttgctcttatagtgtttagagctatacaaggtattggtgcatctacattaattccttcaacaattgcacttactgctaattattttactgggccttcacaaaaatatttaaacacagcagtcatttatatgattgttgctcttaccgctacacttggattaggtgttgttttgggtggtgcattctcagaaacgaatgttggatataaaggatttttctatttcgtttttgcttattcatttgtggttgatgttttacttgttttccttattattccgatcaataaaacagatggtcataataaacttaagatgaaaaatattgattttgttgctgctttcttggttattgttggatgtttattaatgattttaggtttaactgaaggtggtgaaaaatggagatctcctaaagcaattgcaccattaattgttggatttttcacagctgcttcagcattagtttatgaagttctttacataagaagataccaagtactccatcaaaatgaagataaatcatcaagttggaaacttcaagttgatttgttattcccaccagaaattttaaagatcccaaacttttatccatttttgattatttgtggtttatactatgcaacttttgtcatgattattgcaataggtgtttacacgtacagtttaatttatcatgattctaacataataacagcagtcaaagttttcccaatgtcaataggattaggtttcggtgcaattgtttacagagattcttattacaaaaaagttggttataaaagaatgtttattatctctggtgttctttcattagccagtattatttggttctcacgtactaaatttggtacaacaaatgcatattggaaatatgatatgggtgcattcttcttatatggttatggaattaatatctttttcaatatttatatgccattagttattcaatgtactccattacatttacaaggtaatgttaatggtattttccaaacatgcagtcaagttttacttagtattggtaatgcattaattccttcaattgctggtaatcttacaattgcatatacatttgaggaaaagttaatcatacaaaataagcttagaactatcttttatgttatgatgggtttccatgcattcattgttatcttaatggttgttgctatcaaagatccaaaaactatatcaagttctgctgatgatgaagatgctattaatgttgaaaatgataatgttgaaaacaatgctattgatcctaatgttgatattgaaaaattggaaaagactgataactcagaatcatctattgaaagttgtgaaaggaacaaagcagcatctgttgaatgtcaaactgaaaatctatcaacggaatcaaaaaataccaactgataatttattttacatacttatttttattctattttagtgtttttagttaattaatatataattttgcttaatataattttgcttaatataactcttttctcgccttgaaaagtggtgtaagaacaaaaaacagacgatagtttgctattattaaattgctacaaaagtaagaagaatgattccaagttcaagcttaccacaagatatataaaacatatttgttactcaaatatgttaagtttagtttttatcaaaactaagaaaatgaaaaggttaaggattgacccggtagaactaattcgttggtgatttgtagaccctggtgaataattcttattccaggcacatgaattttgaatatttgcttatgtaatcaactacattcataactattcaaagatctttaaaatcaacattgattgaaagtattacactttcttatcttttttgcaataggcgtgaatgaaattacatgaaagagtaaagttttttttacaaaatgtctaatacatttcttttatcaggttttcaaaaaaaagttatctttattttaatatgttttgctaaaaaaaagagcaaaatttgagcacattaaatcataacattagtttgaaaaaacattttcaaccatactttacgctaaaaaatgtttcagaaacaactcaacagatcctaatcatagaaagttgctaacaaaaagtagcaagacggttagcttgaatagtacctaaaaaaagtgccaaaaatcattaaaaactggaaattttatatactttacccttttttaccccagcaatcccaaataaattactaagtaaacttcagacaattgcaaatctaatgattttttaaacaaacaaaaaagtaaaatgataatacttgatattcaaagttataaacataaaatataccattataaagaaaggaaaagaaataaaaattcatgtaataaagtatattcagttagtaatactaataacttccattactgattaatgattttgattgagcattaattactatcaagtaatcagttcaaattcttcatttgattaacgtattcttctaaagaatgtttacctttaacaactgtaacatcatctctattggagagtaattcactatgaagttcatcatggaatttaggtgataatgaggtgaaaatacttaaaattgtatctctattaaatccataagtttccattatatcagcaacattttcagctgggacataattccattttaagtctggtttattgaaaacctttgcatataatttagttaattcaggaactgtaattctgtcactttcaacataagttgtcttaaaaactgtttctttatccttctttggtggattttcaataatatcactaataacatctgcaatatcatgtaatgaagcatatggatgaactttttctgtatctaaaaatgagttaatttcacccttttcaatttctggtaaattaactaataaacctgaataaaattttggtggtttaacaaatgaaatactattaactttaccatttaatttttcctttagaatttgttcattataataatgaaattctaaaccaccaatacctggcttatgtgaaccagctgaacttaagtaaacaatattttgaacacctgattcaagaagaacttcagcaatatattttatttgtttatttgattcttcaacaatatttgcaattgtataaggtaatgcacttaaaacgaatacagaatctgcaccttttaatgtttttaataaaaattctttatcattaatatcaccaatagctggaattgcaccaaatttcttaatttcctctgctttttctgctgaacgtgtaataacaattgtttcaacatcatctttaactaacttagttgcaagtggttttgcaacattacctgtagatccgaaaagtactgctctcattatgatttgtttgtttgtttgtttgttttttgtttttgtttgttgatataattaagtattatattacaattctaacatttcactaacaatttaatactgggaatacccttatttatatacacatcagagtgattatatggaatacggagtttcaagataattttcattgaaaatacatgaactccgtggcgcaacactatgaaacatgtatttaatacgccacaactgattacaaatattggacaattagtaatactatgcaatgtggcgcattaaagaagaccctgtccctatcgcactaataaatcaataccaatgttcccagtagttcatgggcacaccccagtagctttattttcaaccgccagtaataagtttcagttgccactacacttttatgttgcccagtaaatttgacataccgctgggagtagattaaaaccacccagtagtttgagatttccgccctctggtatctaaagcctcagcagctgcaagttactcggaccctacttttgtcatagcaggaccatctttggggcaactaagtcaaatcatatcaataatcttgattgtagtaattgtgattgttttgcaaagtaattacgatattcatcgttttaaaagttagtgttcataataataacggtgagcttagatagtaatcattttaattacggtggattgttgatagtgattattaaaactttctcaaaatcgaaccgtgaataagataatccctacataattcactattattaggatcaccgcaacagtttagtgtgatcaatacaaacattaactcaaattacacttattttaacaactaccaccataatatactagttttactaaaatcaacacctcaaattactgtgattgttgtaatcgccgctaaaacttaacggcactatagtaatcaccgcaaaactcttgcatgattaatccaataacaaccataaaatgctgtaattattatagtcattcaaattcggggcaaattaatgtaacaacttcattaataatgtgtgattaatataattacctccatcatttatggtatataacttaatcaccagtcagaaacacatttatttttaaaatcgtaactaactgtgattaccgtaaatacccaaatctccttaaacgtaaccctagatcaactaattgtaattaatacaattagcttaacataattattaaagttacatctaccattaatagtctattcccattcccatgcagatatgattattataatcacagcaattatccattgtgaatatgatgaatacgtactttacctgatgtatttgtaatcactgtgtcatgattgatatagccatcatcataactgactctgaatataccaattacaatctttacttaacatgattaatacaatatctttcatatttaactatgttggtgtgatcactttcatataccactgtaattattataattaccaccatgtttttttgtggttactatgaacaacgcaaaagatcagcgtggttatagtattaattgctgaagtttaatgtgctcgattcaataacaaccccaagatactgtacttattatgatcactattcctactcactctgattactataatcacacttacctctaagggaaattagtataataacaaaattaattctctgcaattgatataatcactaccattattttcaaaatattctaattatcatttaaaggtaccactgtatttggtatcataactaactgtagctactattatcacaataatcacatctaagacttcccgtgaacataatactcgccggattaactcgccggattaactcgccggattaacttaatcacacctccattaataaattaattcaacatcctaacttgatgtgcattaattttagttttcatagctaaccgtgattaagataactattgtcattgctttatgtgattattatgatagccactataatttactattattagtctaattactttcaagtcataaacatatcaaccgtattttccatattgattatagtaatcataaacatgattcaatttgaatatcataacttctattttatcagaccctgatttaacaattagcaacatcgtgtaccatgattatcataatcactattactaatattgaaacacattgtaactacaggcggtttactattttagtacatacttagtacatagaccccagtatgatctgaccagtgtttgtctaaaatatggttaggatctgactagggacctgagaggcagccgagtagaatccgggtagaatccgagtatgatccgagtaggaaataaggaggaaataagtaggatataggtaaggacttggtttgcacttgactacggtctattctgggtaggacctgactaggagcagaataaggatttgagtagagtctggtttgagtctgactcccgcatggctcaggcttgaataaaatctgacttccgtcggattagagtctgttaaatataatctttactcgctataaataatataaaataaaatgaatatatataagatgagacagcttaaacgatggttaacttgattcaactgttcataaagcatttactaaaattagtaacacgaaatcacactctcatcaactagaatttgccatccattgcttcacgtcttgcaagattttccatcaaacgttccaagaacttccatgaccttctacaaggtatgcatttatgttttaaactcatgctttggttactaattccgtattagctaatatccattgccacgtaagcaatagctgtcatgaacacatgatttccatgtagcgagacatatcctcaattctattattacctaatcttaacaataacacatcttcaaatgtcattaatgacagcttgtcgatggcttatggaaagtttaattttacttattcttcttagacttgcttatggtaaaagtaaatttgttagaagttcattctatacaggtgaattattttcaaaactttattggttggactgaatgtgcttgaggggcatgtatgataattttagtttgtttcccaatgtctaaagtgcctaaacgggtaaaaaaggagataatgaaaaatggacggagaacggaaataagaactgtaattacgaggaaacgagaaataattccggcttccgaacaataaaagcagagctattttctttatagggtttttctttttttttttctttctttctttttttaacaaacacgattattaatcctttaccatgaaagcatttagtataaaagtaagattgcttcccatatttgaacctttactatacaaatctcttatcttgactctaaaaagcatactgtaattcacaattcaatgaccgctaatccattagttaaagcgtttacatgggcaagaacagttgttccattagagaaaagaaatgtgtttgtcgtttatgcaattattttatcaggtacagtccttgatagttctgcatctgccttaacactttcagctaacattcaaaaagaatttaacactgactcatcaactacaagttgggttttatctggttatgctttaacattgggttcctttattatggtttctggtaaaatatctgatgttattggacctcataatttatatttgattggtattacaatcttttggatatcagctcttatctgtgcttgtattccacatacatcaattgttgctcttatagtgtttagagctatacaaggtattggtgcatctacattaattccttcaacaattgcacttactgctaattattttactgggccttcacaaaaatatttaaacacagcagtcatttatatgattgttgctcttaccgctacacttggattaggtgttgttttgggtggtgcattctcagaaacgaatgttggatataaaggatttttctatttcgtttttgcttattcatttgtggttgatgttttacttgttttccttattattccgatcaataaaacagatggtcataataaacttaagatgaaaaatattgattttgttgctgctttcttggttattgttggatgtttattaatgattttaggtttaactgaaggtggtgaaaaatggagatctcctaaagcaattgcaccattaattgttggatttttcacagctgcttcagcattagtttatgaagttctttacataagaagataccaagtactccatcaaaataaagataaatcatcgttggaaacttcaagttgatttattattcccaccagaaatcttaaagatcccaaacttttatccatttttgattatttgtggtttatactatgcaacttttgtcatgattattgcaataggtgtttacacatacagtttaatttatcatgactccaatataataacagcagttaaagttttctcaatgtcaattggattagtttttggagcagccgtttatagagactcttattacaaaaaggttggttataaaagaatgttcattatttctggtgttctttcattagccagtgttatttggttctcacgtactaaatttggtacaacaaatgcatattggaaatatgatatgggtgcattcttcttatatggttattcagtcaatatctttttcaatatttatatgccattagttattcaatatactccattacatttacaaggtaatgttaatggtattttccaaacatgcagtcaagttttacttagtattggtaatgcattgattccttcaattgctggtaatcttacaattgcatatacatttgaggaaaagttaatcatacaaaataagcttagaactatcttttatgttatgatgggtttccatgcattcattgttatattaatggttgttgctatcaaaaatccaaaagctattgaagttgaagatgataatgttgaaaacaatgctattgatcctaatgctgatattgaaaagcttgaagaaaacgataactcagaatcttctattgaaagttctgaaatgaataagaaagcatctgttgaaagtccagctgaaaatttattaattgaatccccaaaaaataccaactgataattcagtttttatactttttctaatctaatttaacatttctataattaattaatatataattttgcttaatataattctaattcattcatgactaaaaaaaatcagaaagacgcaaaaaacaattagcagttggatagtttgctatattagtagttaataataaaaaaaaaatatcaaaaaattaagcccaacgcggggctcgaacccgcagccttttgattgctatcaataaaatatcaatacttaagagtcaaacgctctaccgattgagctagccaggcttatgcgcttttttgtttgaagtaataccaccaactgacgtttaccatttaaaaacgtcacgtgacaaaggtcaattttttacttttatcattttattgatagaaaaaagtgtaattgggaattgttaggtttttttaactgtcgtaccgttaaaacagttttgaacgaattagaaatagatattaatttaatgaaggtcacttattcagtattatgaaaaggaaatgccatcagtaaattacacattgcatttgaaacatccacaacatagacatatactcctaattatttcctctgtctctctgctttataaacaacattattccattttatcagtaattttattagatttgtaatgtccttagtttattttcattgattaattttaatctatttttacaatttaacaaaaaagtttcatagaatttttccgctttaaacggactgatttattatgtagtaccgtaatatagtgctacaaaattgaataagaaaaacaaatatacgtaacaaattatctatttgtgctttgaaaaatccaaattttgttatgagtataaaaactaattataaaagaaccaaaaaaaccatagtggataaagaactgtaactattaatattagaataaaagaaaaaaaaagcaccaggccttttaataaaattaaccatgaaattcataattattattgttgtatggtctataccttcttgcacgaccacctctacttcttctatttctacgacgataattcctagaagctttgaaactattatcatcatcattattattgacatagttcatatcattttggttaccataaaacaccttcatactttcctctaataatgcagcatgcataacacttcttaatgttgaaaatttctcaaactgaacttgttttctgatataaaatggtaattttaaaatgtaattactgataagatatttttcaggtaaatcatctcccataagatacaaatgcatgtcaaatttttcattaaattcagcaacacgcatatctttagtacattttaattcaagaaatgcaaaatggtttaatctttgatctaactcgtgataacaacaatattctttacgaaacaatttaacaaattcagaccaagttggtttgtctgatgaattactttcactttttaaatgtgttaaccatctagaaggttgaccaataagattcattcttgcaaaagtaagtcttgcacttccacttatcccatatgtttcaatgataaactcaatttttgataaccataaatctgcttcgtacattcgagttaacagatctggccatggaccttcttcatcagttcttccaaattttcctgcataatacattgcttctttaaagacaaagagaggggttattgttccattcttgtttgtcttcatatttgattttatattgtaagtatcaacttcgagagtcattttgataaactattcactaaagtaattaggaatagcccaaatttgattaattaaaacttaataatttattttccctcgataacaaaattttttcggagtttgttttctgtgccgaactttttatcttttctgtgtattatttttacgtaagttttggagcatctttactatcatcacaacaaaataactttatattgatcaatttgataagatcatgatttggtttaattttcaggtaaacttggacagattttttagattaaagatcacaaaatagtggcataatgatagtgctatcatactaccatactttttttcaacaaccagccatactagacttaagtttcagaacaagttgattaaaaattcttgtaaaatggttcgattactgttgtacaagtaaagaatttgttgaaaaggtacaaaataaattatatgagataatcatctcatctatcccaaagaggaaattttcttatcatgaaatattgtggctcaaattgattaaaattgtggcatctttttgattttttaaccttttagcatattaagattgaattaaataatatccaattgaacggcttgtatagattatggtgtgatttaatcttctctaagacttctttagtggtgtccatttgaaacagtggagtctataaaaaagccaatataaccataattgtaaacctgctattatggattgataatctttttttgatttctgtaacaaacacacaaacacacacaatgacaacattaggtaacattaactatgatgaagcaattcatttccataatgatagtgatagtaaatctaatacaggtatattaacagtttcaaaggataatttatcgaaaactgaattcccagaatgggcaccaacttgggatattaaacatgatcatgcatttaaagatattgaaccatttaaacatattgatagaggattttcaggtgatccagaatttaaatcattgaaaaatattgatggtgcatcatttaagaaagttagtccaaaattaggtttagcaattgatggtattcaattaagtaaattaaatgatcaacaaaaaaatgatttagcattattagttgcacaatatggtgttattgcatttagaaatcaagattttaaacatcaatcatttgatgaaattaaagattggggtaaatattttggtccattacatgttcatccaacttcaggtgcaccattaaatcatccagaatttcatttagtttatcgtagaggtagtgaagaggaacaaaagaaacattttaaagataaattacataatattgcatggcattcagatgttagttatgaaaaccaaccacctgctttcacattattttcaatgttacaaacaggtgaaagtggtggtgatacacaatttttagatatgtttgaagtttatgatagattatcaccattaatgaaagataaaattgatgatttacaagttttacatacatcaaaagatcaagcatattttgcaaaattatctggtggtatagaaaggaaagatccaagtaattcaattcatccattagttagatatcatccagttttgaaaagaaaatgtttatttattaataaatcattttcaagaaaaattttaggtttgaaaactgaagaaagtgatgatttattaattttccttcttaatcatattgaatcatgtcttgatgcacatgttagattaaattgggatgaaaatacagttgttgtatgggataatagaagagttttacatactgcaacaacagattgggattcatcagatattagacatgcatttagagttacaacaattggtgaaagaccaattagaaatcaacaagaatatgaaaattggacacctgaacaagagaaggaaaaaattagattaactgattatttaacaaatctctcagctgctgattattatgaaaaggttattaatatttaatcaagatcattttttttttatgtattttatttatttatttatataatttattataaacaaacgcttttattaaccaaaatatttatcataaccagttaaaacaaatctgaattttacatcacttttctcaattctaactaatgcttgagtaacattttcttcattaatgtctaaacattcaatcattgggaaaacttcatgttcagaagctaattttaacatgtatttaattttagatggtgaaccactataaataccaccaattttagaattattagcacataaaataaatgggtttaaatttaaagcttcttcaccactagataaaccagtaataagttgtaaattaccttcaggtctcaacattgaaatcaattcagttactgtttttgtattaacaaaagatccagtatgaacaataacatcaaatgcatcttcatttttagttaaataatcaggatcatcctttgttgaaataaatctagttgcacctaatttcaatgctaattcctttttagaatttgaagaagaaatagcagtaacattagcaccaagagcttttgcaaacataatactcatatgaccaataccaccaataccaacaattgcaacttcagtacctttaccaacattagtaattaaaagtggacttaaacttgtcataccaccacaaaataaaggagctgcaacattagttggaatattatcaggaatttggaaagcaaatttatgattaattctaatatgagaggcataaccaccttgtctaccatcaattttatggaaattaccataagttaaaactgattttttacaattaacttcatgattattttcacatctataacaatggccacaggaatcacattgtgcaccaataccaactctatcaccaattttaatatcattatcattaacttcagaacctttattaattacaataccaacaatttcatgacctggaataattggtaattgaggtgggaagaaatcacccctagggaaatgagtatcagcaccacaaacaccacaagctaaaattttaatatcaacatcagttggttttaaaggtgcaggtgtgtattcaattttttcagcattagggtagttttcactcttggtgaatccaataccttgaatctttgtaatttcagtcattattatgtgattgattgtttaattaattaaggttaattatagttaaatggggaattaatttatggggaattatacggctatttatagttatagaggttacttataattagtatacctacggacttaacaacagttcccactccgtgtgctagaagggcatcaccaatgtatcatcaagtagaaacttgcaaggaaaggacttaaaattgatgtctccgtgattaatatctctttctcgccaaacttgcctcattgggaagtggaaatgttttaaagttagtgttaaaattaaaacccaccaaagagtagaatttttaaccgttaagacgtattatacttaggatttcctcttttgctgtctttgctgttgtttcttagccatataagctttaaaattatcattattcttctttttatcattagattcagtattatttgaatcttgttctacctttttatctttaggttttaatttattacgtctattatcaattttatcatcatcatcatcccctaatttttttgtccatttagttgatgttttaccacttattcctttatttaatgaaccaccagtaaataaatatttatcttctaaatttctaaatcttgaactactcttatctaacattctagcccatccctcaatttgttcattactccaaccagtttctttacataattcatttctaaatgttgatttacgatcttctctattaagtttttctctctgtgttgtataaatacgaaataatttattttcaatttcttccattttagaattagagttattagatgtagtagaattagttatttcattatcaatgtatgtatcatcaggttcatcctcatctgcttcatataataatgctaatgctctttgtaaatttttctttttcaattcttcctcagtttcttcatcaatttcattatttgattcctttttacccatttgaacggtatatgttttaccctgatctttaaattcaaattcattcttatttttcttcttactgttcttcttattctttctttcttgctttacatcataatcttcaatattagcaatatcctctaattccatttcaagtaattcattaataattaattcaacatcatcatttttattaactaataatgatttaacttgtccaatacttaattgtgggaacatatcacgaacatgaattattttaaaatcatcaaattctctagtaggtttagtctttttatctattttctttacttcaaataatggtaaaatcatattctttaaatcaggattcatttcattgaatgttttagatagtataattttaccaattaatggataaacagtacgtaatcttattaaactatcaatttcaagttcatttttcaaaaatttgaaaattttaatactagttaatgaacaaaagctcataaccattaatttaacacatgtttcagcattaataccggtaccaccactatataattcttctaatatttcaatccaatgttttgtaacaaaattttgtgaaaattctccattatcattattggaaattttaacatttttcttattattattaccattcttcttattggtattcatccttttagttctttgtccaagtaataaataaaggacatcaaaatcttcatttttgaatttaccacttgcaattaatttacctaagtgatcatgtaatgatctaactaaacttaaatcatcacttttacttgtataagaagatttaatattcccaataattaatttccttataattgataatgtaacaaatgattgattaataccttgaattgaatatttatcagccatattaacataaactatacaaaattcccataatgaattaccaaatattttcaaattaactaaattaacagttttcaaatattggaatacaattaattttaaaatatgttgattagttctaatatttggattaattgcacctaatgagaaaacttgattagattctaatgatgattcatgtagaaaagtttgtatgaaaatttgtaattgtgatgatgttttaacatttagaatatatggtgctggtataccttttttctcctctgtataagtatatggtactaatgcaagtaatttcttgaataatgtaatgtaatctaatagaaggtattcccaaataactggatctttatcaattaatgaagaacgaagtttaaaaggtgggaatataggtattggaatagatagttgttgttgatattgttctactacttgcattgtatggtgcttttgcttcttcttcaagaaaagaaaagaaaataactgttaaagaattgaaatttaggaaaaattgaaattttcatgttgactcaattacttatacttaacgtttattaacaattagaagatatataaatatgatattacttaatattatacaaaatgtccttcttattagaagaagattctcatgatttccaaagcaccacctccaatgagaaggaaacataataaatagataagccattttggtaaattaactgtcttttggttaatttccttcttaaccttttgcttttcaccagttcttacctttttaataccattagcaaacttttcgttagctcttctttgctggaatgtttgaactgcctgtagtagataataataccaattatcaattggaataaatatataattacatgtaatttcacaatatttccaatcttaatcttacaatcttgacacgtatattgtcatactgtgtgagataattatggataaagttggattacatgttatatttccaatcaaatgggtaaataaagaactagatgttagtatactgtgttgatcattcaaaataatcttgtgactaattacataccattgtgaatcgatgttttgttaataagatagatcgaaggaaaggattatataggaataatagaaaatggaaaaaatgaagatttcaccatatttcacgacattttattttgttgctatgtatctatctctttctttacttcttttaaatggacaacaatgagtcacatactacagctttcaagtgataaccaatacatagtacactactctccatcaaaggaaactctcactgttgccaaagtaccttcaaatgcttcaattactaacttatcattatctgaatctgttttaatgaaaacatctcatataaaatcactatcaattcatccatctcaagatataataatagcagtaccgaataaaccacatggacaacaatcatcaggaatacctactggtccttcaagttcaaatagtaaaattttaaaaaatgatattaataatgtcgataaacctataccttttaatcctcagagacaaatttcattaacactttattcatataataaacgtgaaataacttcaaagcaacttatattagatttaattaatgaatcaactccttctttattcccatattgtgttgaatattcttcaaatggtgagtatttagctgtttatacaagatcatattctcatttaactggatattctcatgttttatttttatttgattcaaattataattgtttaacatctatttcattagattcatcattagaagttatgaaatggagtggtgattttattttatgtgcatgtactgatggtaaattacgtgttataaaaataattaatgatgatgatgatgatagtgtatcgttagtattaattaaatcattacatctttcatcatctcctctttcatcaattgattataaagagacattggaagagaaaccaatattattaataggtacacgtgatgggaattcaatattaatggatccaaaatcaatgtcttgttcatattctccattaattgaaaaagatttcccagttttatcagtatctataggtccattatcaacttttattatcacatatgtaacaaatacaaatgaaccagctcatatactacaatataatgaaattgaaccaattgaaaatagagaagttgaaaaaattgaagatgaatcaaattttaatccaattattgatgtttatcaaatttcagatattttcacaaactcttccatttataatcctagtggagtttgttgtacagataatggtattgttatttacttggataaggatggtgataaaataattcttaaaaatttagtgtcattgttaccttcaaaatcaagtgaaattgattttactaaatattttgatggtattgttgttaatgataatagtaaaacaaacaatgaaattatagaatctaaatcaaataatttaaagaacaattctaaggataactattattcaaatcgtgatcatggtagttctaatagtgttaatagaaacaataacaggaataactataataacagtaattctaataacaataataagaacaaaaataatacgaacaataatagttctaacacaaataacattaaaaacaagaataatgccgttaacaataattacaataataagaataacaacaacaatagaaatcatagcaacaatacaagtagcaataacagtaggactaatagtactaaaaacaatacaaataagaacgatttaaataataaaagaccacttgatttatttgaaactgatcgacaacattctgatcgtaaacgtcatgaaacttttgaacaatggtctaaaaatagagaaaataatcaaaataaaaatgatagaggttatcaaaataattacagagataatagaaagaattattatagaaattaattaatattatatgtatataactaagctaattttaaattctccaaattttctaaattttctaatggaacaactaattcatctaaatttggtgaaattatatcatctgcagcctgtgcatatgatggtggacttaatggtgcaattgatggataagttggtggaacttcatcagttaatgaaactcccatacctggtctctcagataatataactttaaattgcatacgtaaaactcttgcaacaccagttgctaaaccttgttgatgattactatgatcagttttattaccaccaacatgatcaggtccaactctatgatcagggaaatcatcttccattaatgcagttctacgtccagttggtgtaggtgttattggtactgtagtttgatttgtatttgtatttgtatttgtatttgatgatattcctgatgatctcattctattcgatgatatattacctgtaactatcgccgctgttgaatttgatgaaatattagatggtacatgtcttgatttagttgaatgatttgaagaagctaatgttgattgcattaattcttctgcaattacaacttctaaaattaaattatgagttacataaataccattatttgaatcatcaatatcaattgaacaattacaacctgaatttgcatcttcaaataattcatcataacctaaattaaatttttctgaattaattgaatttctatatgcaattgtattattaatacccattgaaattaaattcattaaagaaatttgaacaactaattcaattctaccacgacctgaaaaatcagatttccatccatttttaatctctcctgatgaaattgtctttatttcttcaatatacatttcagattgattatttgttggtaaaataacttcatttggattacttagtttattactattattattattattattattagtatttgtattacttgctgataatgataccatactatctaatgaattagattgtatattagaattcattggtgatgcaccaattgaccaatttgatgcagcaggtgctaatggtgtatattcaggagttgattctggcatttcattctgtaaagcttcatgatcacttggatgaatatttggttcttgattacctatactattattattattatttaattgtttctttggtaaactaaaatgataatttaaacttgcatgtccaatacctccactatttttattaattttaaccattttcttttgttttttagtagttaaacaaacttcattaaatttattttcatgagattcacaatgattacttttaactgtaatacattcctctaatctccaatttaattttctcattctccatcttctctttgatgttgaaacattatccattctaatttcaacggggaaaattgaacgtggatatacaacattaggtataactgcagttgatgtaacatcagttggtgggaaaattctagttgaatttttatcttgttctcttaatattgatcttaatattttaataggttgtgataaattaattattctttcctttttcgttattggatctaaatatttaaccatacaaattaattcatatttaattgaagtattagtatttgataatacagttgatggaggtaaatcaccaggtacaacataactgaaaggacatgaatgtgatgaacctttagcaaatgccatttttttcgtcaatatatcccaacgagctaattctgttattttatttgtacatttattacaagattctaaagttgtagaatttggagtaaatggtttaccatatttaattgtttgaatgaggtataatgagacattattcaatacaacataatcatttttcaatattgttttattaacttgagagactgatagtattggttctaaattttcagataaagctggtggagcttccggttgtggctgctgctgttgttgaatattatttattaaaacgtctaaaatgaataaacctgaaaaaaatgcaccagctgatgaatctggtgaaccatagaaaacaattggaggtgattctataccaacagtaacaacaattggttgattctttgaaggtttattacattgtggtgtatgatattcatcataaattgattgtgtggctggtttagctattgacgaagtagcagcaggttgtaaaggattattctttgaagatgaaaatccaaatattttaccaaaagatggtgccattgtctctaatgtagttactctagtagaatgtatataagaagaaccagtgtcagttataaaatcaaataaatttcagttaatcttaatcatgtcaaccagaaaaaaaaattttgacgttttttattatggccggaccggcgtaccggtgcctgtagattttatgaaattggtagcaactgcttttatcttcatttacataagttacacacttaattaaaggaatgaattgataagggtttgaaaattagtgacatagttattgtagacctctttggggattgctctatgtgatgcaagattaaatgtagcacctgaattagaagaagagattaaaagaattgcaaatactgcaccagccattggttgatcaaaataaacagttttaatcttttcatcagatatcatacctaaattagagataacaaatgaaatatttggtttaccattattctctttaagatcatctaatgatttatcaataaatgatctatcctttaatgcttgagtttccaaatattcactagcttcagatgctgattctttattctctgataaatatttttgaaaatttttactcatttctataatttcaccatcttcaattgattggaaatctgtatcattagaaagtctactaatgaaaagaccaaatgttgtaataatatcattaaatggagttgattcaactttatatcttgtattaattgcagttcttgaacgaaatttcatatcagatttaggtgttgaactctctggaaatgcactgataatagctttactaccaatagaatttaataatgaagttagtttaaaaccattatctcttgaaaaatttacaagtttattagtttgttccttagataaatggaataaagttgaattatgattccacattggctttttcataagttctggatcaataattggtcttgcaatatcttccattggttttggttcaatatctcttggtttaaaattcatcattttagttgcattgggatagttataattgaataatccttgagtattaataattgttgactcatcatcatcattggaaggttttacatctaatgctttggaaaattcaatatggaaatttttaccagcagttccatcaaaatatgtatgatccatgaaaaagaaaacagtattagattctaattctaatactagtttccataacggtgttttatcagaataactaaatttcacattattatattttgccaaaattttttcaggagttgagtttgttataacatcaatacaattaagtaaatcatattcctttatgtattcagatgtataaagtttttcatcaccaactgtaagtgaaaaatgtgggaattttaaacaaagaatttttaaagctttagtaactttatttaaatcaagtttaatattatattctgcagctatacaaaaatttgtataaataccgtgatttgcacgggatggcatataagcttcgaaacctgataaaagcattttgtgtggtttttgttttataaatagaatatttattattgagaagtgttaggaataaactatgatcagggaactcatgatagtttttatattacagagatacaatatgtatacaatgactaatggtagcaataatagtcataatagtcataataatgagataagataagatcgctaagaaattttaaatttgacataaatttcagtgccatatcttatcttttaactgagacggtggattagtcacagttgttatttcttatttttgcaatttaattaatgtacatgtaaataattataaataagtaaagaatgctattatattaataatgttgaaatgaaattactcttcatcaacgttaacagttgtttcagtaagtacaacttcatctaaaggtacaattttatcactctcttcttcattttctattccttcaagttcaaatgattcaccagttaatgcagtataaatagatctagcacgaattacaaaatcataatcaggtggagtatgaatttcttccttaggttgtggctttttagtttgtttctccttaatttctgttgattctttattgttctttagtatacctttcttttgtttctttttagtcttttcatcattatcattatcattatcactatcactatcactatcattattttcttcattttgtttttcttgatctcttgcaagttgttcctctgcatctttaactaatttattccattctttcataactgaaatcatttcattaacaattctatcctttgaaccaccttgaacacttttcaaataaataattaaatcattttcataatcttcaggaattgtccttatatttttaattacccaattttgcttttgtttagaaaatttccaattatctttatcattaacataagtacgtaaatattgtaattgatccttaataactattggacgttcacttttaggtaattttactctttttggtggtttagaacctttttgtttcttttctttacctttatattcctttaaatcttttgttgattcatccttattagatatagcatttgcctttctcttctttgattcaggtgctctaacggcaagtgcaagtggatcactagaggtcacagccttgaccttcaatcccaatctcttccaagctggctcacccatgtctttctgtctgtctattgtatactttacctgttcttcacagtaataaaatttttcaatcaataaaattaaaattaaaattttcacagagatgttaaaattgttaagccgcctgtttcgtcgcgtcgttttagaataaaatattcaatttttaatgatacttccctttgtttacaattgagatcagtttcatgattaaagattgttttataggagtgattgattaacaatggtagacgaaagtacattaaaggatgcatttgccctctttgataagagtggtaatggtaaagtttctaatgctgtattaggtgatatgttacgtgcagttggacaaaatccaacattaaaggaaatttcagatttacaagatggaacaaattcagaaattgattattcatcatttgttaaaattgttgaaagagatggtggttttaaatcattaggtaaacctgaagattatattaaagcatttcaaatttttgataaaaatttaacaggttttattagtgttggagaaattaaatatattttaacaacaattggtgaaaaattatcaaatgaagaagttgatgaattattgaaaaatattacagttactgaagataattcagttgattatgctgaattcgttaaaagtattttatctcaataaattttaattatatttatacttattatataattcatttaatcttatgttagtattggtaaaaatgtagcaataatcatcattggtataccgaaaacatctctctttaatgtccaagtacttgaagttctaatattttcaccatttggtgttaataatgtacaatcagtcattacatcaccatttgtatcaccaaatgcaattttagagaataatctaaaatattcaacacaacttttatcatccataatttcaactgcaaatgttgatttacttaataattgatcacgattccatcctgttaagatacaaaattcatctccaacatatgcaatttgtgatgttcttctccaaactaatgttggtgtaccactaatactaatatatgaatcatattctaataatgtacgttggaaacattgttctgcaaaaattaaatcatcttcctttaatttaatcatacctgcaataaatgatggtctatattctgcaatacttttactcattttaactaaatcattctttgaaaatcttgattttaaataaacatttaaatcatgatatggtttaacatatgtaaaaggttttttaactttttcataaatttcacttggttcatgatataataatccagttttagtatctgttggtgtatttaattcattttcttcttcaactgttccaatacaaaatgaaattaaacttttattattaatttcattaaattttaatggttgtgtatctttaaaaattgatatttgtttaacaatttcaggaaatgtatatgttttaataccatcaattgttgatatattaccaataaaatattgatttgttgataaatcacaatgaggttgtaatggatataatatatgtttaacagttttattcatttcaattggttgtaatggaaaagtaaatggtgatctccttgaaggattttcatgaataattgtacctaatgttgaatattcagaatctgcagctgatgaaacaaatcctgttgccatatcaccaccacctccactttcattactaccaacagatgatgatcctaatatattacccaaattcatatcaatagtagtagttgtactactactattagcattagtagtcatattaacactatttatatcatcaaataaatatttcttagttttacgtggtgcatcaatacatgttgattcaagtcctcttttaacacatcttttacaaggtcgtgaatcatcacatgttaaatgtccatttcgacaatgaatacatgctcttgaaactttctttgcaggtactcgtcgtgccattttatgataggatatatggaggtatagtggtagattgttgtaaaagaaagataatttgataatttataataattttgaaatctttcaattcatgaaatgagtgtattactgttttaggaagtctaaaatgatttaaagatacctggggaagtttattatggcattaataatggtattttatattaataatggattgttactagagtatttgtcttttagaatagatctatagcgtttaatagatacctttactaataaaatcacccatatataacacaaataaacactttcagcatacaaaaagaagcaagtcattgaacaaaaggtgaaatttctgagaaaatttggaaaatttggaaaattgattttattaatgatttaattactacttttctttcttcttttttcattgaaataatgtcacactctgctgctattgcgtcccaatggacatctctcgctccacatattgaagatcatattgttgaacttaattcaactcttcaaaaatctacttatattacaggaaatgaaattaatgaaatcgattcaattattttcaaagcaattactccattagctaaatcatggattccaaattcaattgctcaatatagacatattttaagatggattgatttattacaaaatactgttgaaggtttagatgcaggttttaaaattgatttaaatgttgaacttccaagagaaattaaggaaaagaaagaaaagaaaccagttgtagatgctaaggcagatgctaaagctgcaccagctacaccagctgctactgaagcagcaccaactcaaaagggtccaagaggtaaaccatcaccagaagaaattgctaaagcaaaggctgcaaaggaagcaaagaaagctgcaaagaaagctgcaggtggtaataataccggtaatacaccaccaactgttattgtaccagttccttcaatgattgatattagagttggttttattgaaaaggcaattaaacatccagatgctgattcactttatgtttcaacaattcaaatgggtgatgaagaaggtccaagaactgtttgttcaggtttagttaaacattttgaattagaggaaatgcaaaaaagaaaagttattgtaattgctaatttaaaaccagttaatatgagaggtattaaatcatgtgcaatggttttatgtgctgcaagtcctgaaggtaaaattgaatttgttaatccaccaactgattcaaaggcaggtgataaacttttctttgaaggttttgatggtactcctgaaaaagttcttaatccaaagaagaaaatttgggaaactgttcaacctggttttacaactgttgaagatttctcagttgtttataaacaagaaggtaaacctgatgcttatttagttgataaagctggtaaccattgtaaatgtacttctatcgttaatgctgaagttcgttaaattaatttaatttaataataattactctttataaataatatctattaataacatgccttatatatagaagaaagtatgcatccattaaaccaatgataattgaatgattcataataattgtatcagtcactccgacaaaaaaaaattaacatgataatttcagaatttttcatcatgttaattcttcttacaggataccccccctaattaaacaatgaagttaatatcaaaatcatcctctaaagagggagcagttgttgctgttgttccagaagatgcagatgatctttggacattatataatattatttctaaaggtgatgaaattacattaaaatcatacagaaatattaaaccatcagttaatggtatacccatcccaggtgcacaagctcaaagaaaattacttaatttaacattatcagttgaaagttcaacatttgtatcatctgaacgtgaattacgtattaaaggtacaacaacaattccattaattgatgttccattaagttcatatcatactgcaactgttatgattaatgaacaagttaaaatttttaaagaaatttgggattcacatgatgatgaaattattgataatgcatgtaatgcaatgaaagctgaagttggtgcaattgtacttgaggaaggtgtttcacatacttgtttaataactgattcaatgactatactacgtaataaaattgagaaaagtataccaaagaaaagacgtggagattcatcagctcatgataaagcattaaatatatttttaaataatactgcattagctgcattaagaaatttagatattttaaatttaaaggcaattgttgttgcatcaccaggtaaattacaaaatcaacttatagagaaaatatttgaagaaataaataaatctaatgataaagaattaattagatgtaaatctaaatttatttcagcaacaagtagtacaggatatttacagggattagaggaagttttgaaaactccttcaattaagaaacaattatctgatacaaaagttcaaaaaaatgttgcattatttgatgaattttcaaaacatttaaataatgatgattatagagcattctatggtgaaaaagaagttaaaaaggcattagaaattggtggtgcaattaaagtacttttaataacggatacacttttcaaaaatgatgatgttaataagagaagacattatattgacattgttgaacgtgttaaggaagataatggtgatgtttcaattttttcaagtcttcatgattcaggtaaacaacttgatcaattaactggtattgcagtaattcttaattatcccgtacccgatcttgaagaagatgatgatgatgaaagtatttatgaatctgattaatttattcgtttctatattacagttatatacatgattcctatcgtttttattcaaaaaaaacaaacaaacactatttattattctcaacataatttcttaatctttgacttaatttaactggtttaattccaaaccatttatttaaataccaaacatcaacaccacgtataaattgtaatccatcctgtgctaaacctaatactaaacctattttaccacctttatgaataatttgtcttgattgaattctactcatttgattataccaagcataaccaaaacctggtaaacaaactgccatcattgtattaacaaaatctctttcacctctaatttgatctaaaattgcttcaatactgaaaattgtaccaacaaatccaccaattttaataccatttctaaatgcattacccattgcatttttagtacaataataagttttacgtttatgatagaaaaaccatccattataagttgttggtaatctatgagaatttgaggctaaatatttcattgatgattcagtccaacctccaagcattccacctaatgcaccaacaaatccaccacctaatgtaaataatgtaactcttgcaactggtggcataccaaatcttgaattataactttcttcatgtaatttattaatatcatcataaattccttgaatatgatctgcagtagattgtgcatttaagtttttatctaaatcttccggatctatagcagccatgtttgctatagaaaggatgtggagaatctctaatatatgaaaaattagtgaattttagaaatttcatgttgatggaatttcctattgcggaagtttgatttggtaaatatacacaagttacgtgatggtgtcttttctgaacgataggaaacgataatggcaaacctgagtactccattgataccagtgacaggtaagatggtaaacacatatactgcaccattgattgtatctgttttcatttgttcacttgcatcaattcaatatggtttccatatgtcagaattaaatgcaccatcgagatacattagattatcattaggtattaatcaatctgaacttggatttttaacgtcaattttctctattggtggattaattagttcaacatttgcatcatatatttccaagaaatatggacttagaattagttttattattacatcattattttacattgttggttcatttattgaaggtaaaagtgaattatatcattggtttttaattggtagatttacaagtggaattgcagcaggtttagcgattgtttatgtaccagtttatatgaatgatatttcaccaattgaattaagaggagttttaggtagtgttacacaaattagtgttaatttaggcattttaattgcacaatgtttagcaattaaatggaatacattacaattatggagaagtataattgattttggatggatattaggtattttacaattaattttagttattttctttttagtagaaagtcctaaatggttaattgttagacatgaatcaaatgaaagggaaagagaaatggaaatggagaaaggatttgatatattacataaattaagaggaattgaaataccaagtgttttaattaatgaagaaattatgatttggaaagcggagaaggaatcacatttaagggtaattgaatcacaaccacatttaaaaaatttaggattttggtattatcttactgatttgaattattttaattcacgtacaattgcaacatttatgatgttaggacaacaatttggaggtattaattcagttatattttatggagttgatatattaaataaagttttcccaacacatgcattaatgattaatataattttatcaattggtaatacaataattacaagtatttcatcattatttttagataggttgggtagaaaaccattattattgatttcattaaatttaatgattatatcattaattatattaagtattggtataattaataatattgcaacaattacaattttatcaattttcacatatgttggatcatttgcaattggatgtggaccaataccatttttaattatttccgagacaagtcaattagaggttaaagatttggcacaaagttgggcaactgatattaattggatttctgttttcattgttggtactttattcccaattttaaattcaattattggaggttggacatatttaatatttgcaagtgtttgtattgcatttgcaatatttgttaaattctttgttccggaaacaaagggatgtgctacatatgatgatgtatggggtaatcgtgtagattaattatactatttatccagtaattactgttatcattgctattgctaatgttattgtatagataagtaaaataaagataaaaataccaagccaccaattcacgtgaccgagtaaagggtttgaacacgtaaccctcctcagaccatacgccttcccaaaacggaaaccaatgaaaaaaagagaaaaaaagagacgcgcaaaacttcaatctcccataataaactgtgactgtgaaacctccctttaagaaaattctttactactatgtgaattgaattttttctttactgttactatcataatgtaatattgtaatattgtgatatttgaaattgaattttatttcatattttcctattttattatctctttgatattagtttttaatcaaacacatataatatgcctaccagattacacaaaactagaaagcatagaggtaacgtttgtggtacgtatcaaatacatatttaatcataatacaatgataatgataatataatataattgcaattgaaatatccatttttttagaaaagattttttatatcgaaatgtaaagtaaagtaatgataattaatatacaaagtgatagtacaattatggatatgaatatttagagtatatcagttaatatgaaaataaatcagtttttaagaatgaataatatcataatataatatacttctacgaataaaaatctttttttcaaatggatataagatagacattgataaagctaaaaagaaacataatactaacatttccccttcccctttattctcttttttttattaatatagccggtaaaggtagagttggtaaacacagaaagcatcccggtggtagaggtatggccggtggtcaacaccaccacagaactaacttagataaatatcatccaggttatttcggtaaagttggtatgagatattaccataaacaaaatgcacatttctggaaaccagttattaacttagacaaattatggtcattagttgaaaacaaggatgaaaaaattgcatcatcaactaaagatgcagctattgttattgatactttagcttcaggttacggtaaagttttaggtaagggtagacttccagatgttccagttattgttaaagctagatacgtttcaaaattagctgaagaaaaaattagagctgctggtggtgttgttgaattaattgcttaaattaattacatctttatataactataatatactataacacaaatttaaataaaaaatccttctttaatttaatctttattacgttggtacaatttatatcatatcatagctatctatagctatctatatctactactattgaaaaattttcattatgtaatatgtactctcatagtaatattttttttactttcatgattttatttgtttacatttcaaatcttgatctaatgataataaaattgttttacagtttaatgttgaaaaagtttataaatattaacagattaccattcaaacgttcaatgtctacctcatcattaagtgctgaaactttatgggatccaaaatctaatatacctgattcaattattaattatatatcagaatcaaattattcaaataaatattcacaattaaattttttctttcaattaatttcattattaaaacaacaaaaacgtacaggatggataaatatgggtatacctaatcctgaatctatttctgatcatatgtatcgtatgtcaattatttcaatggttttagattcaaaaaattttaataataataatggagaacttatagattttagtaaatgttgtaaaattgcattagttcatgatattgcagaaagtttagttggtgatattgtacctcatgatcttaatattgataaagttgaaaaaagtaaacgtgaatataaggcaatattatatttatgtgaaattattggtaaatatagtttagaaaatgcaaatgaaattaaagaattatggattgattatgaatgtcaaagaaattttgaatcaacaatagttaaagatattgataaatatgaactgttaattcaaacttttgaatatgagagattaaataatgttagaatggatgaattttatagttgtcgtaaagttattaaacatgaagaaattcaaaaattagctgatgaattaattaatcaaagaaatgaatttttaaaattaaataatttatagaaaataaaataaaagtatcatataatattatatatagaatctattaagcatactccaagaattatcaaaaccgaaaattattggtgcaattgaatgtctaagtacaagcattgtaaatccaacaaagaattgtaatttcataattaatgaacataattcaccttcattatgaggtccaaaccaaataattactagattaattaatgtaagattagaacttttaataatatcacccttttcattatattcaagtttaattaattttaattttgataataatgataaaattggttttaaatataattttaaaattggttttttcttttcattattaatatcatcaatttcattattaaaatattcagtaaatgaattatacattaatccatcaatttcattaaatttaggtaatctatgtcttggacaaggtattaaaccaaataattgaggtgaagaataaataaaattaattatttgaggtatgaaaaataacattaaagttttagcataatgacctgaaatacctaaaactgcaaataccataccactaaaataacaccaagtatcaccaacgaaaacttttgaaggatatttattaaaattaaataatgcaattgaaattgatatgaatggaataagtaatgataatgaaaatatatgaatttcataagctgattgtaaaagtaatgaatttccatttaataaatgatgacccaatatatagtataaatcatttaatataagtaaaattgcaattataattgtttgaccaacttcaataccattaatacctgctaatatattaattgaatttggacaaaaaatacttattgaaaacatgtaaatataataaaagatacctaaatctattgaatttgaatttaattgaagataattagatataaaatttggtataagaattgaagttttattaaattctaaataataaatgataattaaaggaatcgatgcaattgcaggtaagaaaaatttatgtctccatctaatatcaaataaatcatcaattaaacctaataaaatcattgattcaagtgataacattgaacttaaatatgaaggtaatgaagaaagccaagtatctgtaccattattattatttaatgaaattaaattattaaatttcccacctgtacttgatttaatgaaaaagaaaggaattgataaaaacataatgaaaaggtaagtaattgcaggtattataccaattgattcaggtattattggtttaccccttttcgacatatctttaccaaataatccacgattaatgaaaaatggtgatgcttgaggaattatattagttattgtaaaataacctataattgcaagtactgatgttgcaattgttggatgcattgtggatggtaaggaattgatcaacagagtatagtattttaaattggaatttcctttaagaacagatcatcatgttaaacttaagtattcctaatccagtaattaagtgataatatttcatttaagccccccatgttctcggaaatttaggagaaaacggaaatactaaagaattacaaaattccgagaaaataggcgtcggcgcgtcgctatttattacggggtcgatgcgtcggtggttttttcaaattattattaaaattaatttactattggaattcccctcacatgtattgagatttgaatattatttgaattggacatgattggatagcagagtttggtattttgaaaaatttactttaaacagtacaagcaacacatatacaatgctttcctctgtctcacgtactacaaggtcagcacctttaactacatctcttgttcaatcaagaaatatttatcgtttcccactttcaagtgatattaatattacaaaatcaggtaaaactaaaattacaacaggtttaggtggtcgtcattctaaaactggttatcaagtatcagttttcggtgcaactggatttttaggtaaaattttaacttcaaaattagcaaaacatggtacaattacaattgtaccatttagaaatggtagatcaaagagacatttaaaaattaatggtgattatggtgttgttaatttccatgaatttgatattagaaatttaaaatcaattgaagaatctgttgctcattctgatgttgtcgttaatttattaggttcacatttaaatactaaaaatttttcaatggcagatgcaaatattgaaagtgcaaatagaattgcaaaaatttcaaaagattatggtgttgataaatttattcatgtttcatcttataatgcagatccaaattcaccttcagaattttttgcaacaaagggtatctctgaacaaattgttaaagaacattatcctgatgcaacaattgttagacctgctccaatgtatggtagaaattcaagatttttaaatgatatgttaactttaaaagttttaggtggtaatattatttatagacaagaagtttatccaactcatgttgaacaagttgctcaagctttagaaaaaataatttatgatgattcaacaattggtaaaacttatgaattatatggtaatgaaagatattcaaaattagaattaagagaaatgcttaaatatatgattcatcttaatcaatatggtttcttccctgctgcttcaggttatgatatgccagttcctgaatttatttcaaaaatttggtgtttattaaatgaaaaattaaatccttcattagaaagttttaattatgatacttatagacgttcaactttacatcaaaaaattgatccaacggctttaacttataaagatttaggtatggttcctgatgaattagctgattggttatataaatatgttaaacctcatattatttcatcttctcaagcaaagaatagaactgtttatggtagagaagaaattttaaaattaagagattatgttaattctccaaagaatcgtctcgatttattcggttatggtacaaagaattaatcaatgtctttattattaactaattaattaactaactaacttctacgctattcaataatttatttattatttatatattaaacttataatatttatattcaaaaacatccacgtaatttttattattattatcattatcatcataatttactatttgttaattataaaaaaattatatataaaaaaaaaactatgatactatgctacatttattatacattaatgctatatttatttatatgctattctttattctttaatattcctcataataacctctaatatcttcacctcttttaccatattctctctttaaattaaatccacaactaatatctttaatccaaggatgtgaacacatactacctgcatcaattcttttacttggatcaaattctaacattggtaataagaaattactaatttcattagctaattctttattcattttatattcatcaattaaaacattttctaatggccaaatttttaatttattaattttcctaaaattttgtccacttctatcgaaaaattccctccatttactagttgttcttaaatattcctttggtggccaacttttcaataattcaacaatttgagctaaatgatcatcatcccttgaatatgatgttgaagattttggatcaaataaataatcacttgtaattaattcaaatattaaacatcctgttgaccataaatctgttgaacaaccccaatctccacctaatataatttcaggtgctctatattgtcttgtttgaatatcttcagtataatgtttattaaaccaacatgcattacctaaatctgctattttaatactaataatttcatcaaattcttctaaaattgattgttgtgatgatgttgaaaatgttgatggttctctatcaacaaattcttcatcctttaattcatcattttgtgattttgtatcaatttttaatgatggtttacgactttcattaggttcaggaaatggatccagtttaatattatttggtaaatcatttaatgttttcatactatcaattgaatttaatttattatgagattttaaatgttgaggaattggtgtcagggtatgtaatggttcattattattataattattattataattatcattattaatttcatttgcatcaacgaaaacttgatcatcatctgtttgacttgatgatgatgtatttatacctgatgttccaattgaaatgtttaaatcttcttcgttaataacattaaacattttagattgtttataacttgaaatacttaatgtactattttgtctattattattatttatttgtgatggtaatgtatttggtaaagttgttgaaatattattattattatcattattattattattattattattatctgatgatttatgtaatggtaatggaatatttaatggagttgaaggtgttgtattattattattattattattattaatattttcttgtaatggagatgaaaatgatgaatttctcttttgtgagaatgaaaatgatctgaaaaaattattaacacttgaattttcaacaggtgaagttaatggtttacttgatctaacgggtattgaatttttccttgatcttgatttatttgatggtattatactattagataatgaagattgatgaagatgagttgaactagtaattgatgaatcttttaaatttcttattatacttgattgattagctgatatacttcttgataatgaatgaaatgaacggaaactttgatcagcataatcatctgatggtgtattaaaattatctaatttatcaatttcattaattgataaacttgtagtatgatataatgtattagaatgatcagcatgtctctttttcaataatttatttaattttttactctttctttcaaattctaataattgaactaatttttcaacatcatgaatttcaactaatacattttcaggtttaatatctgtatgaattataccacattctctatgaagataatctaatgctaataaaatttgttttgaaatttgtttaactaatgtaattggtaaacctccataactttcacttaaaatatgtaaatcatgaatatttgaaatatgcatattaagtttttcattatcattgttattattaatttcattattactttcattatctttaccattaacaatatcattaatttccttttgtctatgattttgaaattctttatatctaactaataaattaagcatattttcacctaaaacttcgaaaaccatacaaacatgattaccatttggacctttatgaataaaatgatctaataatttaacaatatgttttttaccttcatgattattattttttaagttaacagtttctaataatttaatttcatcaattgcagcttcagtataattatttgaagatttaacaattttaattgcaacatgtcttaaattaattgaatcccatgaaagccaaacagttgaaaaatgtccccaacctaattttctaacaattaaatattcattatttaaaccatataattcaccaataaaagttggatgataaccacctggtatataatcattaagactttcttcacattttaattttttctccttttcattatctgttaattcattatctgaatcagtatctaatgatgaaatttcatcatcattattggtattattggtattattagtattttgagataaaatacttgaatcagtatctaacagtaatgtagctttaggagatttaagtatattttcaattggtgaattttgtgttgtttgtggtatacttgacagttcaggtgaagaatttttaattttaagagttaattcattaattttggaattatttgataaattagttgaaggttcattagaagatgatggttcaacttctaatattacttcaggttttaattgatcatttgatgaaggtgaagttgataatgatgaacgtaatggtggatcaattattggtatagatgttggagttgatggtgaatttggagattttatcttttgcttttgtttctctttttctttttccttttctttttcttttataattgacgttgataaaagagatttttgttgatttggggtatgttgatctttatgttgttgaggattttgctttgtaaatgagaattttgaaaagaatttaaattttgatttagtatttgtattggtattggtgttattatttgaagaatttgaagaagaaatactattattattattattattaattgaaaatgatgaagatgaagatacagattttgggaaagaaattgatttattccttgataatttaaaaggatttgaaatattattatgaagaggagatgagtttacagaagacatgatgatacttatctcatgtatatccaataaaacctggtaaatgaaattataatataaccatcatcaatataataaccatcatcgataataaattcatgatgaggaacagaaaatgaaatttttcaattttaaaggcgtcggtgcgtcggtggataataataataatattttactgtggacgggttccgttaccggattaggcaatttaaatattttccatcatgttttccaagaataatttactgaatttatttaaatacgattggaatttacttttatttttatttttatttcagtttttcatttgcaattagtgtctctcttccttttttaaccaatcaatcaaatcatgtctgtatccatctttgaatctcctttaactcttggtgtaactggtttaattgccggtgtaagtgcttattatttattttctaaattttcaaataatgaacgtaaagttttgaaaaaggatgaatttcaagaattcccattaattcaaaaagttgtactttctaaagattctgcaattttccgttttggtttaccaaatccaaatgatgttttaggtttaccaattggtcaacatattcaaattcaagctgaaattgatggtaaaaatgttatgcattcttatactccaacttcattagatcaagatagtaaaggtttctttgaattattaattaaagtttatccaaatggtaaattatcaacttttattgataatttaaaattaggtgaaaaaattaaagttaaaggtccaaaaggtttctataattataaaccaaatatgttaaatcatatttgtatggttgcaggtggtacaggtattacaccaatgtatcaaattattaaatcaattttaactaatccaattgataaaactaatattactttattatatggttcacaaactgaggatgatatccttttacgtgcagaattagatgaatttgcatctaaatttgataattttaatgtaattcatttcttagatagagcacctgaaaattggaatggtaaatcaggttatattaataaagatgcattaattgaatttttcccaaaaccaaataatgatgttcaattattaatttgtggtcctccaggtttagtttcttctgttaagaaagcttcaaatgaattaggttttgcaaaggctaaacctgtttcaaaggatggtgatcaagttttccttttctaattgtttagaacattttttaaaactttttatactttttataattttaacattattatcgtaattagttattaatttaagtgaatgtgatatacagaaattgttatatatatatatgaaagagggggggtatgggtcattaatttgatgaaagttttaaatcttcaattctatgatctaatgccatactatcatttgtaaatgataaactatatttattattacgaaatggatgtaataataaattatcatgtaatgcatttaatgctttaataacattttctttactaataacacaactaatattaatttcatttgcaccttgactaatcatttcaatattaatttgttcatctgctaaaattttaaacattgcacctgctgtaccaattaattgtttcatatgaataccaactaatgaaacaattgataaatcatatgtaacatcaactccaccaaatttttttaaatcttcaataacttttaaaaatgatttcctttgatctttaaaatatgaaactgccattgaaacatgaacttcacttgttgaaattaaatcaacaactgttttatgtttatctaaaatactgaaaacgtttgctaaaaatccatgtgataaagttttcttatttgaatgaatattaacaactgcaatatcatttttagctgtaacagcagttggaattttcattttttgtttattaaaataatcacttggtaatttatctaatgaaactggtggatgtggaggagtttgttcaccctttttacttatattatcaggataaataattgtaccttcaccatttggattcataacatttttaattctaattggaattctagcattaataacttgttccattgtaaatggatgaataacttcactaccataataagttaattcagctgcttcatcgggagtaactgattttaataatcttgcaaatttaacttttcttggatctgcagtgaaaataccatcaacttctttccaaatttgtaattcatttgctgataatccaactgcaataattgctgcacataaatctgtataacctctaccaacagaatttaataaaccaccaggtacaggaccgaaaaatcctgttaaaactggtacaacattatcatctaattttaaaatttcaattgaaattcttttagctaattttttataaaataatggatctaaagatttttcattatttgataaatgatcatcattatcataatccatttcattaacaatatttgataaattaatataatgagaatttataccattattatttaataatgcagtcataaataaacatgataatttttcaccacatgacattatattatctaaagatttagaactaatttcaccaataatacaacaagcatctaataatttttctatataatcaatttcataaattgtatcattaattaatttttcccttatttctaaattagtaattaaattttcagcatttttaatatgatcatctttaattaatttaagagtttttttaaattcttcttctttatcatcaattgctaattctgatgctaataataatcttgtagttgtaccttcagatttagtttgagttgatctagcagaacaaacaactgcaactctatttgattcattatattttttaacaatattaagtgtaatttcatttgcaaatttaccaacacttgtaccaccaaatttttgtacaatccaacctgaattaagggaatataatgaagttgttgacattatatgtgtgttttgtgagatgctgataatggaaaagatagaaataaataaagaaagaaagtagagtaaatggaaaatatacccatctagtgactcaccaaccattgctgaatttattcctgtaatgtaaaaaacggacgtttgaaaatttatgatggattacgtaatggttggaaaaaacctccgataccggttaaagactatcaaagaatccattataagcagtatcaacatcaagtaataaattctctaattgattatcatcaagaattggtttatcatcattatttttcaattgatttaatttaattaaccaattaattaaatttgatctacctttaaaattatcatttatatttgaacttgttgttataattttacttaataaaggatgtaaaatttcaggtgaattataatttaatttaattgcatcaagtaatgttataaatgctgatgttgcctgtgctacttctttacctgatttaattgtttcagtgggtacttcaattgaagtttcttccttttcaggttcaggttcaggttcaggttctgctttttcttttaattgttcatcaaatccattaataccaatttgaattcttcgtatacctaattttaaaacttctctcaattcaacatttgtgacgtgtaataatttataatgttttaaattatctaagaatgttaagtcatttaaatcattattattatcattattattattattatttataatattccattgattaagtaattcattagataatttaatataatcattctttaaatcattatcattacaattagctttaataaattgttcctctaatagtgttaatgattgtaaaattgagtatttctcaactaattggatccattgtataaagaatgcatgaattgctcagctaaatgttattaatagggcaaaaattacttacataataatcgaatcaaatttttttcttttacagatttttgaaaaaaaaaatgtttaatttgttacttatttaagaatgtatatgtaaaatgtaatgtaatatggttgtagataaataatatactatataatagtaataatagtatttaaattagaattagatagaatagaagagaggagattttaaagataaatttattttatatgaataatttaattattttgattgaacttgagaataagtactgaaaggatttgcattctttgaagctaaatattcatcagatttttcttgccattctttattcattgtctttggaatatttctatttgaataataagttaagaataaagttgcagagaatgcaacacctaatataatacctttaaaaattttagacatttcttcaggtgtttccattggtcttcttggaccccaagtaccgaatgatacataccaacaagctttcttttcttctaatgataattcattccaaggtaatttttgtttaattgctaatgcatcaattaaatgttgtttatcactttcaggtaatttttcccatctaccttgtaaatttgaaattgcagcaggtgtaattgttgttgatgcaaatctagaattaacaagactagttttgatagtttgtttagttaattgtgagaacattgctgtgtgtaattgttgaactaagtgaaataaaatgaatatacactacttaactagtataatctattaaagacacatactattactatacgcgcttattatactattactatgtctcactcactcacaccatttcaaaattttggcagtggatgattttattggtccaatgagattctctttatttatacgtaactggtgtactgattattattattattataatgtttcttacagacgcgtctgtggttttatacagtatagttattacataatcaacttccattaattacttaacttatcctttaattgtgataaatattctctatatccttgaactgtattacttctatcttcaactaatgtactcatacaccacattcttaatgcaattaaatctctattacgatcaacattagaattcataatattagcttcattattagatggtccaattacaatataaacattactatatttaattgatccactcttctctctaattttattaattatattatgtatacgttgattaaattcattatccaaaattggtaattctcttttaccaataggaaatttcattaattgaattaactccaaatacatcaaaaattaattgttcaattgcatctcctccaatataaatgaaaatttcattatttgtattaattaaatataatccaaatctttgtaaataattaattgatgcattaatacattcaggtaaaataatttcaccatttaattttggtataatttcatcaaaattatcttctccttcatatggtaatccacattcatcattcatatcatgtaaactataaatacttggataaataaattgaattaattcattaattggtaatgaatttaatttattaattgaattacttctatgatcacttggtaccatacctgatctaaatgcaatatttttaattaatgattgaattaataatggtaacattcttaaatttgttgaaatttgtaatggtgatgatgatccaacatttgttgcaacaatttctttcttataaacatttaaaatttctaaaattgatttatttaaatattctcttgcaatttcaaatgaattatttaaaattttttcagttccaacatgtgtaaaataatttaaaattgataattgatctgctgatgcataaatattatttaaattatttgaaactggtaatgctaatgttaaaactctaattcttctatctgaatgacatgatgtatgtaaaattgctgtttgaaaataaacaatatttcttctaatatcattatcaattgataattcaacaacatatgattgatctcttggaaatgatgggaatgataataaatctgatgatcttgaaaaaaaatttccaaaatatgcattacctttaattccatcagaacatctaactcttaaaactgcttctaatccaatttccattgataaatgatttgataattcatttgaaaatttattaatatcttctaaattatttgaattaaatgcaggataaaaatgtgtttgacctgctgtaaattttgttaaatttgataatgttgcaacatcttgatatgttgaacttgttaaaaacatatcaacagtaatttgtgatttattacaatcaattgcaaaacttttataaaatgaattatttgaaattaataaactattttccttacttttaccagaaactgccttttcatctctaacaattaatttacctttaccaatatttggtaatgatgaagaaataacaatcattttaccaccaatattttgtaataatttatgacctgtctttaaagcagttgataaattaaaatcaattgattgattattaataaaatatgatgtaaaattatttaataatttttcaatatttttacgtgaattttttaaattaacaactaaattatctgcacaaggtataattaaatcatccaatgaattattatttggatcatcatcattaactgatacaactaacattgaaattaaattattttcatcattatcatttggaatttcgaaaaatgataaatttttatcaactgcaataaatgaaacatttgccctaccatgatcatttggaattctatctaaagaatctaaaatagttctaattgaagttgataataaaccatttttaattgaattaattgaaacatcaattaaaaataaataatttaatgattgaggagctctaaccatatattcaggagttgctaaaaattcaactgcaccataatttaattcatatctattaaaaaattgatcatttttagccattgaaggtaattcatttaataatgaacaaaaattacatttccatttactattatcatttcttaattcaacaaatggattaatataagcacgacatcttctacatcttgaaataataccatcattaataattggtaaaggattttcattatcagttaatgaaaggtaaggacgaattgttaaagcaaatggtaattttgatttttttaataaattatttgaatttggaacaacatttaaagttgatctaatataatctgatgaagtatttgattcaggtgattgagtaattgatgaattaattggtaaattaattggaggtggaggaaattgtaaatcaataattggaggtggtatatcttttaataaatcagttgaatataattcattaaacatttcaggtgcaggaccattaatattatttaaattatttggattattaacattattaatatttaaattttggaaattatttgataaatcatagggagatgcattatatggtgcattgatatttggaattggattagaatttaatggagtttgttgaattggaacttgttgaaatggaatttgttgttgttgttgttgttgaaatggaattgattgttgttgttgaggaattgcatttgatgttggaggtaatatattattattaatattaccattagccaatggatcataagcaggttgtggataagctcttctcttactagccattgtagaaaggagggatgttgtataaaataaaataaatagagttaattaagctgagccagttgagatagtataattgcctttatttctcaaattgaaatcatcaaagaaaataaaataaacaccgtgttcaaaatttactatggtcgtcgcatcgacctttttggtttttctctttactattatggatggcaaattatatagtatattgaacttataatacgatctttactgctcttctttgcttttggtattggtatagtattagtcttagtatacaatacactacaatatacaatgacaatgacaacatcacctcaagctgttagatcattatatcgttcaatgttaagagaggcaagaggtttcactaattataatttccgtaattattttattcgtcgaacaagagattcatttagagaaaatgcaaatttaaagggtgaagatgcaattaaggcgattaatgaagcaaagaatgatttaaagatacttcatcgtcaaaatgttatctctaatatgtatgattttgataaattagttgttgaaaaggtgtaatatagtatattgattattacctaatataattaaattatactgtgaatttctttttttttttatcatttaattattatcatcaattaatgataccttatttctttctgtacatttatatatctatcttatatctattatataatatatatcttatatccatataattaattataactattattattattattacaatattaataataaaataactattctattccatcccatataaattataacatttttacttagtataaatttttcacatttcaaatgtcgggaagtacaagtaataataataatcaatatgaaaatattgtatcatcaattgattataatagtatgaataacaataataatattaataatatcaatactaaccaattagatactaatcataatattcctcaaataatatcatccaatgatattcaaattaataataataataataataatatgcaacaattaataccctcaaatatatcaaatacatcaaatttatcaaataatcaaatacaatcaataccaactacaaagggtaaatattcattaaatgatttccatttaattcaaactttaggtacaggttcatttggtagagttcatttagtttgttcagttcataatggtagatattatgcaatgaaagttttccgaaaatctcatgttgttagagcaaagcaaattgaacatacaaatgatgaacgtaaaattttatcattatgtaaacatccttttataactagaatgtgggggacatttcaagattgtaaatcaattttcattataatggattatatagaaggtggtgaattatttagtttattaagaaaatcaaaagttttcccaaatcaagttgcaaaattttattcagctgaagttttacttgcattagaatatttacattcaaagaatataatttatagagatttaaaacctgaaaatatattaatttcaagatctggtcatattaaattagcagattttggatttgcaaaacaagttgaaacaactacttatacattatgtggtacacctgattatattgcacctgaaattattgccgttcaaccttatacaaaagcagttgattggtggtctttcggtattttaatttatgaaatgattgctggtacaactccattttatgatccttcacctttgaaaacttatgaaaatataactaaatgtaatgtaatttatccaaatcatttccaattagatgttataaatttattacaaggtttaattaataaagatgttacttatagattaggtaatttaaaaaatggtgttcaagatattaaaaatcatcgttggtttaatgaagttatttgggaaaatttattacaaggtaatattgaaactccttatgaaccaaatatacctgcaggtgttggtgatgcatctcaatttgaaaaatatcctgaagaaagatatgattatggaattagtggtatacatgatcaattcggttatcttttccctgatttttaataactttactactaattttacattcatattatcatcatctattttctatttctaattctaatctgtatcaatagtttgtatcatatatattatatgtatatattctcttttctctctttctctcttcttctctctatctctttatctatctgtttaagttttgatttaataaaaaatcattatacattatattataaaacccctattttactatcattatgatgaataacaatttcttcatctttaacattatcattctctattttccccttaaattcattaaatattctatttactctttcatcttccatttcattaatcataacttcactaaatattaaaaatttttccttattaatttgattttcattaagtaaacctaatttaaatttttttgacagataaacaatttttgacctaatttcaatttcacattcattaaatatattaaatataaattcttgatatttatttaatttacatttatttccattattttctaaccattcccttataattccattatttgaatttttctcccaatataaataaattaaattaacattatttgtttcaattattctagttattaaatatccatcaattatcataccattagttatattaattaaattttgaaagtcaatattatttaaaattaaatgatttttaatccaaatttcattaaattcactctttaaaattaatttaacattatcataatcttttaacattttatatcttgcacttaatgctaatccacaaattattcgacttttaagattattttcccaatcacttattatataatttgcatttaaattaatcttttcatgaattttacgtacattattaatacctaatttcattaaaattttactaaatattaaacttgttaaacctttccggaaacttaaatgtgataatattatcattaattcttcttcattagttttcttatttagaatttcataaattttaccaattggcatattaattaatctcctatttaattcatcctcttgagtatttttataaattccaatattattttgaatatattttaacctttcattaatttcttgaatattattctcttgtttataattaatcttctctaattcatttattcgtaaatgaatttcattatcaatattttgtccctttatattaagtatatttaaaatattattatttgtacctttatttaattttaaactacttaatgatatatttctcttatgattgataatattaggtattatttcctttttcactattgctagttttaatcatattatacttgattaattattaaaatgaaagaaaaataggtagattaaataagaactattttaaaaaaggacatcacttcccaaattcatgtcattaaggggctttcaaaaattattagtaacaatcactaaaaaaataactgcgcaagccaggaatcgaaccaggggctcaacgatggcaacgttgaattttaccactaaaccacttgcgcttgttatgctttggacacttctatgtttttttaccccttattgtgttatatattacgtaagcatacaaggcactggttttttttagccttttattgttttctaataacgttatcctagtaatggaaatttttgtttagtacactagataaaggaaatgtaataaaaaagccttatttgtcgcaatgaaacatgtttaatgacggtgtctacttgactaaataattgcttacctagtcacgttttgaactggattaattggctaaactagttatattttgtttaaatttgtaatattgtagaataattgattaattaatgagctgaaatgagtattttgagagggttttagttatatcataaatatattcctgaaaaagtggtcaaatcaatctgtttagtggtaggatatgttcaaagataacttattttaaagttttgagtctaaataaagctttacactgtttacatccaattttattagttgtatcggatggatgatgtcaaccattattataatgacatttttgttagtaaatagccaaaaagtaataattctggtgaaaaattacaaacaaagatgatttagatatcttattaaggtaattacaaagcataaacctgttattttctttcttttatgcttacgaaatgtactattagaaaatgtggataaacataccaaagggaaaaacaataattccttgttagctcagtcggtagagcgttcggcttttaagagttctttaagaagtcgaccgaaatgtccagggttcgagcccctgatgaggagtttatttttttccatttttgtcttaactatcactttcagtttttactataattttcgtcgaagcactataaaaagagtgttgttttgcctccgttttaaattttgcattttattcgttactgttattttatttcttctttttgccttcttcttttggtattcttttagaatcactgggatatggggatgctgctatatccctaagagaatatcccatttatctactagttatttcagaaaattacagtttagttgctaacacaaatagtacttttatcttgtaaatagtgttttaaatcattgttgcaaaattcaggtaccattatcatgttctaagaataccaatcttatagccttttgatgaaaattgagtctcagaaaaattaataaattgtttaatagcagtagaagctgcagatttggttgccaaaggtaaaattgaacaccatctggaaaaatcatcaacaattgttaaaaaatatctttcaccagataaaccaggaacattaatatgaccacaaacatcagaatgaatcaattgaagaggatgaattgctttaaaagtagatgattttgggaaaaccttggtcattttaccagcagaacagtgttcacaaattttaaattcagaggaaggagagtaacccaattccctcataaccctaccagatggatgacctaatctagaatgcatatttaaagtattagcaattaaacaataattctaaggaataaatggtgaaaaaataaattgatacaaagtatttggaaaatattcaccaatgattgtaccatcttgcatgtaacagtatctatcatcaaaagaaaatctagcaccggtgtttctagtaatcattggaaattaaatttctggaagtattaggaacataagcaacattacttattgaaattctttgaccattatgaccagttgaaaatgacagtacttatcactttaactcacttattaaaatggattttccaataggataacctcaatttaacaggtcgtgagttttttcacccacttgtggccaaagtcattaatacagaatttaccagcataaacaactgatttgaaaacatgccaagcaactatcactattaccttcagtagtattaccatttgctggttaaatggaaacgggaaacagcagcagtgcaatttggagaaatatgaccagtttgttgacatcttagtgcatataacatccttttgttttctatttttgggaatcagcatcatctaaaattcttgaattgaccgagggatcacgaaaacatttgaagatataaaagacctaataaagtgatcaataggtcatgccatgagtaaattgagatctcatggtctttaaaaataataatcccttgtcaagtggcatagaggatgatttagttaacttgtcaaccattgaataaagttgacgggcagacaatcctaggatgatctcttctaattgctgctaataaggcagaaccagacaaagcattcacattgatagatggaaataatattaccatcaacggtattaataaggacaacttgaagggcccgtttaagataaaatgttaattgaacaacactggggtcattggccgaagtatcccacaaaactaataaatcactgtcagtaaaaaattccaataaaccagactcaaaagtagctaaaatggaaccgtactagaatcattagatgtgatatttttcagcagatttcaaagtattagcagaagtctttggacacaagtgggagaatgaactcataacctgttgaattatggtaatcttgtattgatcataattttgtatcttttatattttattttttcatcaatatagtatactgtaagtaacaaagcttaagtggtgtaactaaaatatagttaagcctctgaaaaaaaagtaacaactgttccaacaattatgggaactaaaattctttttcttcatcaacattgaaacatagtttagttaaacttaaaattaaccaactttgaaatttaaaactgaaacaccaagttaaaaataatgctttaaaaaactccaaaaaataaaaatgaaggaagcgaggttcgaactcgcgcggacaatcgcccaacagatcttaagtctgccgccttagaccactcggccatccctccaattgttttcttttaaagtggctttttgttctctctgctagtcataaggattacgtaattacaatttggcctatttgactgtatggtcttttcagttttaataaccttttttcgatttaaattaatctattatttttgcgtgagcgcaccaaaaaataaaaaaataaaaaaataaaaaaataaaaaaaaaaatgattgaaaaaggggccctaaaagctactacaatcgacgattcaggtcctcccgaccctcaaaacgttactaaaccgcccaacttaccccatgatgagttcaacaagttaccttcagtctttgctgaagaaaaagaaaacgaaggtttgaaccaaactgaccatgaaactcaagacgaagatgaagatattgaatttcaagattgcgctgaggaagatgaagtagtccaagaggtaaatgcagaacctcaaccaaccatgacgttggctcaaaaactccataaaacaattacggaggcaaatattaaggttgataaagatcatctttatcacctttcatactttctaaaagttggcaaagatcaatttttagaccttgaaaaattacaagaaattttatcctctttcttaaaagaattagaaagaaatattaatactacaaatttagcagaaatgcacaaagagtttcaatttatctttgaagattattacaaaagcaaagataacaacaacaataatattgttaaaaataaaaaaatcaacaaagttcataataatatgagcaaaccaattgatgcaccaactgagaatacaatggaagaaggtgcaaacatgtttaatactgataaatacagtttaaaaattaacctaccattggctgaaccaccgatggaattattacaattagtttctaccatgttagtagaaacatttaattcatatgatcttaacttaatggatcaatcttttgaagaaaacaacacacttgttgttttaaaaacggagttccctcctttcatcattaaatctaaatatgatgaaattattaaaaatctctattcagaatacggagaaattatgtcttgtcaattaccacaagaaaaagaatccaaaatggcattcaatatgaagttctacgaacaaaataaaattatttacacagtgttaaaactaaaatcatcagttttaccacctaaaattcattccatctcacacacaacaggtggaaaaacccataaaatccccatcaccacttacttgtctactgcacctacacattgtgtatactgcagatgtacagaccacactacagctagatgtccaatgaaaccaagttgtagaagatgttacaatcctagacacaagggcaaagaaggtgaaattccaaagaatggtcacagagaaattttctgtccaaaatcatcggaggctgaacaagaaaggttatttaattccctccacccaaaaacaagagagaatttcttcaaaaaaactctctcaagatcattaccaatgtgggcattgagaattagaaacgcaacggttaatgatcaagtattttacgctcctgttactccaagaacatcaactacaaatggtaatgggaaaagaagtagagcccaaacctctacaaacattttaaatctagatgcagctgttgttatcaataatgacaaagtagattcagatggcttctctattccatctaaacctaagaacttatctaggtcagattcatcatcatcaatagtcagtaacgttgataatgcggtcaatcctttccaagtattggaaaatgtggatgatccagaaattccaaatgaagatgaaaacatccatagtaatgaagagatagaagatatggttgttgaaactaagcatgccgaaactacaagaagtatgccaaaaactccaactcaacctagaaatgtcagaacattagttaaattttctaaacaaggtaagagtgtagcaactggtacattattagatgctaaaaaaatagaaatggcattagaaagaaaagagaaacttgaaaaaaagaaatctcaaatggatttagactcacaagtctaattcatttaattcttcaagtttaataaaatataaaaatataaaaataaaaaaaaaaaaaatataaaatatcataatgaataagttaaaaattttaaatttcaatattcagaaggcaactagtccttctaaattaattcatattctaaactatgcaaaaaataaaaaaattcaaattatgtgtcttacagaatttgatctaaatcaatcaactgaattatcttcaattcaacaattattatccaatttcgatttcaaaattgcgattcaatctgttcaacatcgaacagcaattatttaccattcttcaatagaaatcatttcaaataatatttttccaaggcataatcgtgagaatcaacttgcaaacttttatgtctgtgatataacaataaatttcaaacaagaaaacttaactatcatctctgtttatgtaccagtttacaataatgttaatgataacagattccactgcattaacaaaaaagatttcattgacacattatgtccaactttatcatcattatctcgtggtgaaaataatctaatcatttgtggtgattggaatacacatcctatggaagcaacaaatttaaatcgtattgaatcatttcttcatcaacaattaatggaaaataatttatatgatattttcttccttccaaataatagaagaagtatatgttataccaaccacggttcaaatggaacaaataatcggctagatcgtttccatgtttccttcaatctgctaagaaatatcaattttaaatatagagtacatcaaaagctaccatttacaacacatagaccggtagtatgtacattatcagatatcaattcaaattctaataataatataattaataaagataatttttacaaaagaataccatcaattcctgactacattattgaaaataaacaattatataaatacattttcaccaatgagattctggatactaaaagcccatcaatggattataatgcatatatgcaaagagttcgctggaaaacaaataaagtaattcagataatgaaacatttaccttcatataaggaaaaaatatcatctaaagaattaggatttgattttaatgatcctcaattcaacaatatctcagctaatctctcaaaaaacttcaagagacttagacttagatttggaaaacattcaaatgaagccaatttggatgaaaatattataactgatgctaactcattttattcaaatcttttcgcatcaaatgaaatttattcaaatcaaaatttaaataacaaatttgacaagttcactgaaaatattaaagaacaattaactgagaaagagaaaaatgatttaactaaacctttttcaaaacaagagatatataaaaaccttctaaggctaaatgaaaatggtccatcatcaccagggactgatggtattacttacagagattggaaaaacaaccgagtttctgctgcggtgattctaaccaacatggcaaattacattcttcaaggcaatttaaccacaactgataagattggtaaagtattgataaaattaattcccaaaaagagttatcgacaagatcttccatcaatatatgatctacgtcctatcagtcttacaaattcatcacttagattaatcaacttttctatttctaatagaataatgcctattgcaaacaggattatttcccatcatcaacaagcatttatgcttcacagaaatattcatttacatattgaaactgcaaggattcttgctaatcaaatcaattcatcaccattatccaatgaacaacatatattattagtagacttgaaaaaagctttcgattctattgatcatcaatatcttaaaaagatcttagaaaaatttgggttccctaattcaactattgaagcaactactaaccaatctaggttagcatcggctaatatagttaatcaaaattggatccataaatttaatattccattaaggagaggtgtaagacaaggtttacctttctcacccctgatattcaatcttgcaatacaaccactgattattaaactccatcaatcaattagaggaatgaaatacaatccatacaatgagagaggtttaaatgctaagctttttatcaatattctagcttttgctgatgatatatgtctgtttcaccagaacaataatgaactattaaaatcactatcaattttaaataattttgctcaaatttcggatcttaaaaaatcaataatttttattaataataaaggtatcaataatatcaaacaatttgctaatataaatcaattgaagctatcaattttagatatcaaagaaaatcctatctatctaggaatccccttgttgaaaatcaactggtacaataaaataaaccaattgaaaactagactaaggaaaactatgtttttagatctaaatttatatcaaagagtagtagctgttaatacttacatttattccactatctattattttgatcaacatgatccaattccggatcctcttttaaattcttttgaaacttatgttaaaaaagaattagttaaatatttaccgctgaaaattgcagttagaagaatcaaatggcatcaacctcacaaaaatgggggtatgggtctgatcgaccttggtaaacaacttcaaggtagaagagcatatttcatttatataacgactattaaacaaaagttaaaatttataaatgaacatcctttgacattaataatctcacactcattacaaggaattattaatgttatgatcagaaatcactacgtttatcattgttattacaaatatgttgaaaattacatactatcaaatagagctgtacctggaaacttaccaaaaataaaaataccaggtactatttccaatggattaatttcaacatatccgttcagtcttcttctgcataaaaatcataaaatatggggaagtaatattaccattgaagaaactctttcaaatgaaatgttaaaggttgcaaaacctaaaataataaatgtaaatacagggaaaataataatcgatcttgaaccaaatatcaatttcattatcgaacaccctgtgaattacaacatggatgaagcttcttcaaaaacattagcaccattaatggtgtactctaatattttcccatatttacaaggatggtattatttaactaatattcactcagattttcaggttaaagaaactacagatttcaatgcaacatcgttattttcaatggtagaaaaaaatgttcaaaaatggaaaattgtagaaattttcaataaaaatcaggaaatcaatgttgaatcatttaaacacttttctaaaagattttacaaagaagaatttaaaaataaatttaatgctgattattgggatggtaaactagaccatcaactggattgggaaacatgctttggttggttgggtagaatcaccaatcaaaaccatgttgattttaatgaattatttgaattacaaacaggaatgttgaattcccatttttatcacccttgccaattctgcgaaggggaaggtgggactcatcatgtctttttcaactgtaaaggaattgaaataattctaaaagaattagagataaaaattgatctaaagaatattgttggtttaatatcaacaaagaaagatgcttataaagcaaatataataatcaagttaattatattttttaacaaacaatgctacaaaagcaataagaatgatccagagtttaggataacaaaaagatatattaaagatacatatttgctattcaaatatgaaaaatttagttcttattagatctaaattagatgaaaaagattgagaataatcaaacagaaataatttacatttagttcagtatatgaagatatattgaattgatgaagcatgaataatatatgcgtataagtaatcaatctgtataaaattgtatattttaatgaaattaatgtaaaaaaaaaaaaaaatttatgatatatgcgtataagtaatcaatttgtacaaaattgtatattttaatgaaattaatgtaaaaaaaaatattttatttaagctcagtataagaaggtatactgaattgatgaagcataaataattaatgcgtatatgttgaacggtaaccgctttggtatacttattcataattaattactttaagtgtataaaaagaaataacaatatatgagttgtagtaaagaaaaacaataagtaagttgttgaacggtaacggctctagtatagatatccatagttagttactttaaggttataaaaagaaataataatatataagttataataaagaaaaacaataagtaagttaaagaacaataaagagtaagtggaaacttctctttatttagacaaatttatgtctaagataattggtgttttgattaaaaatcaaatgtttcatgtttctatttgtcatcatatgaggcattagtaatcataagcacatctttttatagtaacaatgaaacatttgtatctcaacaccccaccataagctaaacatcaattaggttcataccagttaatttcacaaatctttgaaatttgattttagataaaactttggtaaacatatcagcaatcatgttttcagtgttaatagaatgaatttcacaatcattatttttaatatgatccctaataaaatgttgtctaatgtcagtatgcttggtccgttgatgatgcacagaatgtgatgataacatcttgcaaacttcattgccttcaaaaatcattggtgcctcatggacttttaaaccaatgtgttcaatcaattgttttaaccaaagcaattccttaatagcgtcacccagtgccatatacttggcttccgttgatgacaaagcaacagtttgctgttttgtggatttccatgtgataacagtgttacccaatttaaaattgtaaccagttatagcttttctatcaactttatcacttgcccaatctgagtcacagtacccagccaatttaaaactatttgagtatttaaattctaatcccaaattcaaagttcttttaatgtatcttaatacatgtttagcagcatttatatgagtttgatgaggatttttaatgaatcttgataaagaggatgcagcataagctaagtcaggtcttacggtgttagcagcaaataatagtttccccaccatggtgagataccgagaggcctttttttcatgaacacatttaccttctggaattaaagaagtactaggcgcaataggaacagtcacagcattatattctgtcataccaaaatcagccaaaaaatttaataaatacctgttgagatgcatgcacactttttcatcatcttgcatgatctccatacccaaaaatgtggaaactcttcccaaatccttcattttaaactttgatgataattcttgtttaacatctttaattgaagcattatcatttgacaaaatcagcaaatcatcaacatagagggcatccaaaataataacacctgaggaaaccttagaatagacaccaaattcagaaacagctttgttaaaaccataattcaaaagaaccgaattaattttaatattccaacataaagaagattgcttaagtccataaagacttttcttcaaacgacacactttgtcgacagcagttcgaacacctgggggataaccatataaatttcttcttcaatatccccatttaaaaatgcagttgtaacatccatttgatgcatttttaatttaaattgtgccgcaagggcaaataaaactttaatactttcatatcttacaactggactgaaagtttcaccataatcaattccttgaatttgtctaaagccttgtgcaacaagacgtgctttatatgtaggtggtgttgaatctttaatggtaaaaacccatctgcaaccaatagctctacgatatgcttgtagagtacataattcccaagtattgttatcaacatgagcttgaagctctttctcaatagcatccgaccaaaatttagaatcagggccacttaaagcttccggcagagaagaagaaatgtagtcagatgttgaagagtcattgatgactttatgtacagcatttaatacatggaatgaaggcccagtgtgttgtcttttagcatcacgaccatctgtatcagtaacttctgaaattgttcttgttaatgatgttgcagtactagaagcatcgggaagaatattgataacctccgagtcttcattgagaatattattggatgtcataatttcaaaatttgattcaaccatctgaatatcatccagcaaatcaccctgttccagcatatatggcatcattggggcatgaacattatgaaacaaatcatgttcattcatataatcaaagtaatcatcaagttctgtaccagcaagtacagtcgtagtttcagtttgcgtttcagattttccagtaacagatgaaaaatcactagcagtttcatttggtacataatcttcatcttcagcagaatcgtattcatccaacatttccatacctgcaagttgtggaccactatcttcatcttgggatgattgattaagtggtctatgaataccaacatctaagttaacattttcattttcatcggccaaaccgatatctttttcaatagcaacagttgtatcaatatttgcctcttcatttggagtctcagataatatagagtcaagttcaggaggtgtggaaggtaaaacattggtggactcgaatctaaggaaagtaagttcacctgagtaaattccagatgagttagtaatatctagtggaagataagccccaccagcagctgcaccggcataaatatctgacaaaatttttgtctgatctgaaccttatccatatctcttttcttacggtatggaaaataatcatcttgaaatttgacattatttgaaataacaatgtcttgtaagtccgggacgtagcatctgtatgccttatgatcaggactgtaaccaacaaaaatagcatcaactgtttgaagcatcaaaaatagaatttcttttggttttaggaaccaaaacacgacattgaacactgaaaggatgaaaaattgaataatttggagaataatcgttccataattcaaaaggggatttatttttcaaataagaaaatggaagccgattgataacaaattcagcagtcttaactgcttttgaccagaacttaatgggtgcaccggctgatgcaattaattttcttgttttctcttgaatggttctatgtttcctttccgcaacaccgttttgagaggagttgtaaggaacagttttctgatggaaaatacctttttcataataaaattcatccataattttgttgcaaaactcagtaccattatcggttctgattttagataccttgtatcccttaccactaaaatgattttcagctgttttaataaaattcataacagcgttgttgcaatctgattttacttctaatggaacaatctgagtccatctagaaaagtcatcaacaatagttaaaaaaatatttttcaagaccaataccggcaaccgaaattggaccacataaatctgcatggagaagtagtaaaggagcagttgatttaggaaaataaccagcttttggaaacgtcctagttgacttaccagctgcacaagatgaacattcaatcatatttggagcatcagaaaatcccagttgtaacattgtttgaggggatggatgacccagtgcattatgtgcattcaaagttctaagagggggtatagcgagaaacacagtcgcgttttcataccttgtaaccctaggtggaaaatccaaaacatacagataaggactttcaatgtagcaatttttcttgaaatattgtcagcagaattggtaaacattgcatgatcggaataaaaagtaaaagcacctgttgatgaagcctttttaatagaaattaaattttgcatggcatcaggaacataacaaacatcattcaaagtaattttgaaagatgtttcaggatcgatgaactcgtcagtaccaacacctgtaacatttaaattggtgttagcaattccagtgatggtaccagttgattcacggaaataaacaaaatggcgaatatcctttaaaatatgcaaagtggaacctgaatctaaaacatagctttctctagctacttctgtaacatcagttgtattgtagactgaccaaccaaccccactgttattattagattccgattttggttttgaatctgaagtatttgacttgtttcttgaagcaggagctggagctaaacaatttcttgcagtatgtcctttcttattgcagctgtagcacataatgggagaagaacccacattgtttggtttatattttatttagtgtatttaaataactattactgttgttaataatggacactgcatctagagtaagtaacttacaacatcaatataaacttgcatattttaatgaaatgaatgtaaaaaaactgtttaaataaagatgtcttaaattgtattgcttttgattaatttatcaacgtgttaaacggcaactgctttagtagtgttgtataagggtaattctattagcaaaatccattttaataagcaagttaaaatatagtttgtattgttatttaaataagataaacaaaagtaaaataaataatataaagaaaataagaggaaataaaaaattataaaagtgggaaacatgttcctttatataataagattttcactttgaaaaacttcatttttcaaggtgagggttttaacttcttgacgagggtttctcttcttatggtgagggtttcaaattcttgttgagggtttcttcttctaaaggttttgattcttatagtcacgggttcgaatcctagtttagattaatatctcaacaccctaccataatctaaacttaaccaaaatgtgaaataggagtcataccaatcttacagttgaattttctaaacttcattctattcaaattctttgtaaacatatcagcagccatttcatctgttctaaccgattccaaattgaaaaccttgttacctaaatgctctctaataaaatggtgtttgatatcaatatgctttgtcctttgatgatggacaggatgacttgtaagcaacttgcaaccttcattatcttcaaaaattgtaggtggataattgaatttaagaccaacagttttaagcaattgaattaaccaaagtagttctttaactgtatcaccaagtgccatgtattcagcttcagtagatgataatgcagtagtgggttgtttcttagacttccaagtaatagcacagccagacatcataaatacatacccagtaattgattttctatcaaacttatcaccagcccaatctgaatcactaaaaccaatcaattgaaaattagataccttcttataaaccaaaccaaatgatacagtacctttaatataccttaagacatgtttagcagcagcaatatgattagctcttggatctttaatgaatcttgataatgtagaagcagcataggacaaatcaggacgacaagtgttagcagcaaataataacttccctaccatgctgcgaaaacgggtaacatcagcatcagaaatagcatcaccaggcaaaaaatcagtaccagcagcaaatggagtagaaacaggattgcaatcttgcatattaaaatcaaccaaataatcattgagatagtgatttaaagataaaccaacacttccttcagattgatgtaaattcataccaagaaacctagaagcaacaccaagatctttcatcttatagtgagaagagagaagacctttaacatcagaaatggcagcaggattatttgaacaaattaataaatcatcaacataaagagcaacaataacaatagagccagaaaacaccttagtataaataccatattcatttgaacacctttgaaagtcagcagacaataaaacttgattgatagcttgattccaacaaaaaggagcttgttttaaaccataaagactcttgttaagcttgcaaaccataccagaaggagcatcaacaccatcaggaaccatcatataaatttcttcattcaaagtaccattcaaaaatgcagttgaaacatccatttgatggatctttaagtcaaattgagctgagatagcaagaacaattctaatactttcatacctgacaactggggaaaatgtttcaaaataatctaaaccataaacttgcctaaaaccttgagcaactaatctagctttgtaagtaggtggtgatgttgaatctttaatagtgaaaacccagcgacaaccaatagcacgacgaccagcaggaagaggaaccaaagaccaagtagtattcaattgatgagcatctaattcagtttggatagcagataaccaaaaggatctgtcatatgacttaacagcctgattaaaagtagttggtaaagcagatgaaacagtagtagatgcagaaaaagcagtgtgaatggcattggaacctaaaaataatgctttggaacgcttaggaactgaatcaacaatatcagagagctgagacaaggacctttgcattggaacaatagcagatggttgagctggagcaagtgctggtgatgaagtggtagatgatggtgtagtagatgatgtagatgatgaagcaagtgtttctggtttgaaacatggcttttgcagtggaggttgagtaatagatgctgaagtggtatcacttctgtaacgacgtaatggaagtaaagatggttcaataggaacttgatgaacttcatcataaactggataagcaaaatcattaggaatagaatcaatttcttcttcatcaccagatgaaactaatttgtcttcatcaggaaaaaatttggaaacaccattatcttcttgtgaaataatattatcaatagcatcagaaattggaacagaggcaacagtttcaggaacactaggagagttaggaaccatttcagtattatctggaacaaccccagaagattgcatcataggtgaagaagaagcagatactggagcagatgatgatgatgatgatgatgatgatgatgatgaagctggagatgatggtgatgatgaagtagttgaatgagcatccgaagtggatgaggaggaaggtgctggtgaagatggtgctggggattgaaccggtgaatgattaataataagaggttcagcagaattagatgcaccagatggaataacaggaacaccaccagcattaccaccatagaaaatatcagaaggagaaacgtcctccataataggaatattgtttttagagtctaacattggaaaataggaatcatcaaatttgacattatttgaaacaacaacatcttgaatcctaggaataaaaaccctataggctttatgtgctggactatatccaacaaaaataccagcaactgagaccggtgaaaaaatgttttccctcttttcctttggaattaataccatgcatttacaaccaaaagaatgaaaaattgaataattaggaaccctgcccatccataattcgtaagcagttttaccattgagaacatcagatggatatctattgataataaactcagcagttttaacagcttcagaccaaaaattaaattgtaaaccagactcagaaaggagagttcttgctttctcttgaacagtacgatgttttctttcggcaacaccattttgagatgaattgtatggaacagtaagttgatgagtaatacctttatcttgtaaataatgttttaaatcattgttgcaaaattcagtaccattatcagttctaataatactaaccttaaaacctttggatgagaactgagtttcagaaaagttgatgaattgtttaataactgaagaagcagcagatttggttgccaaaggtaaaattgaacaccatctggaaaaatcatcaacaattgttaaaaaatatctttcaccagataaaccaggaacattaataggaccacaaacatctgaatgaatcaattgaagaggatgagttgctttaaaagtagatgattttggtagaaccttagtcattttaccagcagaacagtgttcacaaattttaacatcagaggaaggagtataacccaattccctcataaccctaccagatgggtgacccaatctggaatgcatgttcaaagtatttgcaattaaacaataattttcagagataattggtaagaaaataaattgatacaaagtatttgaaaaatacttaccaataactgagccatcttgcatataacaataaccttcatcaaaataaattcttgaaccagttttcctagtaattgctttaatggaaatcaaatttctggaagtatttggaacataagcaacattactgattgaaattctttggccattattaccattaaaaatgacagtgcctctacccataatttgtaaattatcaccagaaataccagaaacagtttcaacagaagtagcagaaacataatcactaaaatgttcaaaattcttagtcatatgaagattagcaccagaatcaagagtataagtgtcaccagcatgaacaattggttgagaaacatgccaagcaacatcattagtagaaacttcagaattattaatattgttagttggcttagtggaaataggaacagcagcagtacaatttggagaaatatgaccagattgttgacatcttctgcaaataacatcttttgaagtctttgattttctgtttctagatttcggcttgttagcaataaaagcttgagcagaaggagcaccattggaagatgaggaggtagcaatatccttaagagatgcttcaatagctgataaactaatttggggatcagcagcatctaaaattcttgaattgaccgaaggatcacgaaacatttgtaggtataaaagacctaacaggtgatcaatagtcatgccatgagtaaattgagatctcatggtctttaaaaataataatcctttgtcaagtggcatagaggatgatttagttaatttgtcaaccattgaataaagttgacgagcagacaatctagaataatctcttctaattgctgctaataaggcagaaccagacaagccttcacattgataattggaaataatgttaccatcaacggtattaataaggacaacttgaagggcccggttaagataaaatgttaattgaacaacactagggtcatcggccggagtatccggtgagactaataaatcaccgtcagtaaaaaattccaataaaccggacccaaaagtagctaaaatggagcgaacaccaacatcccaattgtgataattttcagcagatttcaaagtattaatagatgactttggacacaagtgagagaatgaactcataacctgttgtataagggtaattctattagcaaaatccattttaataagcaagttaaaatatagtttgtattgttatttaaataagataaacaaaagtaaaataaataatataaagaaaataagaggaaataaaaaattataaaagtgggaaacatgttcctttatataataagattttcactttgaaaaacttcatttttcaaggtgagggttttaacttcttgacgagggtttctcttcttatggtgagggtttcaaattcttgttgagggtttcttcttctaaaggttttgattcttatagtcacgggttcgaatcctagtttagattaatatctcaacaagtagaagtattctttttgtaatctaattattgttgatgcatcgtccatgattaacagtatgttgtaatctaacgactctttgggcaggatccatattttacaacaacaacagtattaaaagaacaaactaaataaactataaaataacttagattatacaaaatatcaacagactccgttcctaggagatcttcgtttttattatacttagaattccaacgttaactatcgtttctttttccaattcgtttcatttcacttgcgttacatttctgcttcataacgtttctttttctgatttgcgagcaatacttaaatctaatctgttttcaaggctcaacttaataatacaatattattatgtattatttagtttcgcttaaaattaccactcccaacacaataaagtttcatatgaaaaccaaataaaatatataaaaaatctattgagtttgaccacaatcaaacttttagttaacatttatttattagcaatcataaaagtggtaatgataggtttgatttaaactttattattctgagtgtgatatctaataaaatgatgtctaatatcaatatgttttgttttttgatgataaactggaatcttagataacaactcacaaacttcatcatcttcatatataactgaaatggcatcactctttaaacctagaactatgtagcaattgtctaatccacaatagttttttaactgcataagccatatattcagcttcttttaaagataaagcaatagtttgttgctttttacatttccatgtgataattgagttacctaacttaaacaaataaccactcatttatccattctgcatcacagtaacccactaattcaaaatcattacattctttaaatattaaacccagcttggttgtacctttgatatattttaatgtatgtttgcaagcactcaaatgcttagagtaaggttcataaatcttgataaatatgaagcagcaaatagtaaatctgttcgcaatgtattagcatcaaattaccatgctgcggaatactgtagcatcagattccaaaagtttcaaaccatcatcaattgaactaatgtttgaaggaagtggatcagaacaccaacttttgttgaatattcactccatttttcaatactattattactttcaactatttctaaactttcatttaaatcaaacctttttgtataatacgttcttcaaatcctaattctttctctgtactaccgcaattagctctataacatccacctaatgcacctgcatttccaatttcaagagcattacattcagtcataccaaaatcttgtaacatattcaaaaaggtttagcattaacaattatttgttaggattcagggtattttcgctgggcattctatcaagtaggttatttaattaagtagtataaaacgaataaataaattacgatacaatgtacaataagtcaacctgggaacttatttaccatgtgtattgaatataaacttaaccttctcttgaatgtatctgtttaatagattataatgtttgtactcagttatctaaacaactagtccataactactatccttgatcacttcacgtctgagtaccagattgattggttaatccctctttttcatttcattccttccgtaagcgaaagaacacacagcaacacacacaataaacatcaaatatttccacgagcatctgcgagcttacgctctactgggatttatgtatcttcatacatttagacaatctcgcaaagcagagaattactaacaggcttatgtcaagaacttactctgacaatcatgactgtattacagtacatcactttggcacactgagcagccggccttccatcttaatctagttggtaatgttgaatacacgttcacaaccgtagttctaaactattgatgtaatcacttcagtttttccgagtcaatgtgaaatccaaagaatcattccctgttgattaaataagttagtaaattcaattggagatgaaaagaacaggccgtaacagacggtgatgacttaatttgaaatgcatttcatttggccaatttgaaagtagtgtttggctcattggatggaatatcacttaaatctgtatccatatccgtaccggcaacagaaatgccaatagcaatggcaggaggaagctgacctaatttggaatgcattagtttaatcttggctggtgtaactgcaacaactttaacaacaaatgaaatatagtctgaaaaatacaacgaaacttcagcggaatcaaattgtaaatgatcattggaaccacctaaaataaaatgaacccttacaaagccccaaattgatatgctcttttaatgaagaataaattttgtgtagcagcagggacttaacgcacaacattcaaaacaactccttggccagtagatggatgaactaatttagtttcaccaattcctttaacatctagatgatcttcggtaataccagagacttgacgaccatttgttttaaatacaacaaactgatccttgttaacagcaatgtaaatatgggatctagtgtccaccaaatagttgtttgacataagtaatttaaaattaaaagccatgcgtgactcgtaaccctttgtaacccagttactctagatacaacacccattattagcaacagtgaaagttatttaaagaaactaaataaattataaattttagaaaaattgtgttttgattactaattcctcatataaaacattagttataaatatcacaactagtctaataccacatggtttaaacttttaaaaataatttgtgtaacgtttttttacaacaacaatgaaacatttgtatctcaacatacgccaatttattttattttattttttacaaatatatcacacattattatttttataaccaagatatacagctctttctaaaaccaaagcttagattaaatatgctttaacttgctcattcattatcaatgtttgttttcatttaattatacaacttgaccaaaattttttaattggtcatattgttaattccaaaaatttcttaaatttaaatttattagatattcatattttcaaaatttcaccatcttcttcaacatcttcttcttatttgtaagctctctctctacttactccctttttatggattttaaaattaaataaataaatacatcatagtaaatgaatttggtcttagtattgaatgtactgggtagtccacggagtctgtagagtccatgaaagagtgtgccgcaaattgcatacatgattataacacctgtagctgaagatcaagttactacggaattaagcaatgcagatttgattattatatattctcgtttgaataaaaaagctgtatattctatcagtagctagattaatacggattttttgtaaacaaaatttaacattattgctttacgtttctgctcaaaaacattagattatttgagtttctttccattcgaatgagaatgttttatattgattgtctaatatttcatgatgttaactatttttattagtttttttgttctcataataaatgaagggggtatattttttgacgcaaacattttccgcctctcagtttttgcacttatacaaggaaaaacaacagcagtttcagaatgaaaaaggttacaactacagttatcatgttatgcatatcacttttaaataaagtatcattaaacatgaacccggacgttttttttttttttttgggctgtgttcagctatgtaaaccgacattctctcaaggtgatatttacttggctattcgccataagttgaagtggtttatctaaacatatttcctaagcctcaacttagcctcaattaaaatgcctcagagacttatgttttattactatattagggggagcatgtattcccacttttattatttgtatttcctcttcttttttttccattatctattttacttttgtttactttatttaaataacaatacagttattattataactaatatggactttgcaaataggataaccttaatagaacaagtgcaaatactacttggttttaaagtaatatctccacggctttgtctacaactatacaaaaactacaaaaaaaataaactcagcaaactttttttaaatattcaatcatcacttgctcgaccatctgttaatttcattgttcctggttagatgcatgatgatttggtttaatagttgatcaggatttaaaatcatcaattgaacgttttcttggacctactcatactaatgatatgaatgaacaaaaaagcccacaacttgaaagaatgagaaaaatgtggcagtggattttaattcaatgaataagaaaaaagttcatacactagttaatggatcaaaaattgttaaaaataccttaattgttggatttaggtggatattcagtgtaaaattacaacaggcggaaagaaaagaaatattcaagtgaggcaaattatttatacaaaaggttttaatgaatttttgcaattacacttataaaatatattgtttttactattaatggcacaaaaaatagactaaaaacacatctttttgttcataaaagactgaaaataatgtttattaggaaaaactagacgagtatgagttgttaaaggtttaatagaatatcacctatttaatgaataatttgtttgattccacataggcaccttatcagaccacttgatttttactaggagtgcacattatagtaaaatccactaatgattataatccattttagagggtgaatttaatgtgttgagattgtcagggcgtacatacgacactgccgacgtaaagtccatatctcaggctagggaattgccatgagcgaggtattggacgtcgagactacaaccgacacacatttatactatactatttatagttcattatataacagaagtaatacacttatccctcacctaagctatagagcgagtcacagagataattaatctaaacttaatgcgaggtacagtctccagcatcatcttcacctgcacattcctcctcattcactttggattctcattcaactacttcatcgccaccactatattcagctttatcaagctcatcaccgtcattatcatcatctgcttcttcttcacatatgatgtaatctgctaatactacttctattgttgccgcagataacattgaaatggttcctaattctcctagtgtccctaaaactgttgcctcggtttcaatttctgatgctattgatagtattattccacaaaaaaacaagttttaaattttttccctgatgataataaagtagtttcatctggcgataaagaagaattgatctatttctaacaattctgcttgtccagtttatgatgaagttcatcgagtattaaaccatttttacttccattacgttgttgcaaaagtggcacttcttcagcatatattacttagccaccactacataaacagtgtttcaaaccaggcacagtcgctccatctattttttaatctactaccccatctgatatttcaattccagctccatctacttttccacttccacctattattccaatgcataggtctttgtatccgctctctaatattttaattcctactcgttctaaagtattgttttcaggttctgataaagtttgtatataagaaatccgtgttaatctaattactaaatatatagaatatacatacaaggggtacaataaagtgtcatattaaaagaactttttacttagctgttctaggcatttaaaatgtctcgttatacacatgtatgcattttgcggccctttattggcaacttcagtgcactctacagactttgtgaactatccattacttttatgacaaatctttttgattattggctatcaaaattgaattaaatgctcatcagatgtataatatttggcccttggttcttcttcctgttggtcttcgtgctgttggttgtcgctgggttttcactattaaagttttaacaccgctacctacttacaatgctagattagttgctcaagatttccgtatggttaagattattttgatgcattttttccagttgtcaggtatgaaagcgttaaaattgttttgctatctctcagtttgacataaagatccatcgaatggatgtttctactgcatttttgaattgtattttaaacatcccatcaattaatgttacaaccgagattttcagatgctccaaatatgattgaatgctcattttgtgcagctggtaagtcgactggaacttttccaaaacctggttattctcctaaatcaaactgttcctttgcaacttttccatgcaattttgattgccagtattggtcttgaaaaatattttttaattatcgttgatcacttctctatatggatttggattgtctcagtagaagtaaaaaactgcaacagcgctgttatgaattttattaacacagctgaaaatcctttttaataagtaagtttgttatttaaataatataaagaaaagaagaaaaaatacaaatgataaaaaagtacctgcttccttatatagtaataaaaaataaatttttgtggctttgtggcttttttaaatatgtttagattaaccatatcagcaataaaaaaggtactttccaacaaaaaactgttgcttatgattcctctcaaaaaagtgttgcagaaaggaaacatagaactgtaagaaattgtacgtagtccggccgatagatctgaactacgtaatataatataagacaacaggattataatttcctgttataggttgtataagaaaacaagaacactaactgcatcagccggtgcttccattaggttttggttagaggcagttaagactgctcaatatgttgtcagtcaaatttcaagatgattattttccgtatctaagaaaagggatattgataagattgaggaccaaacaaaaattccgtcagatgtttacaaatattcattttttattactatataggggaacgtgtattcccacttttattacttgtattttctcttattttctttatattattcattttacacttgtttatgttgtactgaggttatcctatttgcaaagtccatattagttataataataattgtattgttatttaaataagataaacaaaagtaaaataaataatataaagaaaagaagagaaaatacaaataataaaagtgggaatacatgttcccttatatagttatcaaaatgaacatgaaaagcaagtgcttacccctctttgaacaaaacccctccgagcggggtttatttaaagtgtgaccatcttcgggagtaagggatgtgtgaccgtctttggcaacatggaaatgaacatgcggggtaaggtaccccactttgagtttagattaaccatctcaacagtttacattatttaaacaacaatacaaactatattctaacttacttattgaaatggattttaaaaataggataacctctattcaacagtaattaaattaatacatatctgtatttacagacttactcaattaaatgtacagccaaatatggctttaaatttatgtaagttaatttttatttatccaaaataatgaggctcaaataaaatccattagtacagtttctaagattgctaacaaatggggttaaattcaacaacatatttgaaagaatgcgtgtggccaatatataattaatttgtggtcgtggtttagtgatgaaaatagtagatattcatgcaaaactaaatattactgtataaactgattagttctgattattgcttgcatttcaaaaaaaagaaacgacagtgcagtcatgaagtgcaataaaacaaagaatttcaaaaattaatagtatttcttttaaaagtctttattagttttgtattatgttttttcatttatattttagtttgtctttttaattaacttttactgctgttataaagtggatcatataattagattacaaaataattaataaaaaatacaagggtcagagctagaaaaattatctaccaaactgaaactcccagagttgaaccatctgagaatggccccagattttccacttaccaaaaaaataacatttaatcctatgaataagctttttggtaaccccaataaaatcaatgaataggttgaggcatctaaacttagcgcaacagaatggctatccacagttaaagaaattatgataatgggtgggagttccaattgatacaaggattctttatacaagaattggttcaaatagacttaactccaaagttggtagcttggattgggatgaattaagcaaaataactattttatagctcaactacaattttgctataatgatagtatttttaagtttaatgctaaatttgaaaaattgttaataaacaggggaatccttcacctatgagcttcatcatggatgcatttaataaaactaccagctcattagaaaacaaattgaaaatgtggcctttttttaaattatcatgaaattgttaagcgtgtggaaaatacttcaaatttcaataaatcttttctccaacaaaaccacaaataaattcccttgataaaaacggtagacgcagaggtatagttatgtaggtaaagactacactaatttattacatcatgattaaaatgcttttattacaaattatattcttttttactagctatggctaaggcatataaattaatgggttaaaatcctattgttgaattgaagttatcttatttgtaaaatccattgctaatatagataaaatataatttgtattgttatttaaataagataaacaaaagtaaaataaataatataaagaagataagagaaaatacaaataataaaagtgggaatacatgttcccttatatagtaatgaaaaatgaaactttgaggcatttaattgaggggcttagaaattatgtttagatccatctcaacacctataagttttcattgctttgtgaaatacaactataaaatgaagtcattagagagactaaaaaaattatgttttgttactgtttaaaaattcaccgtgataaagtttcaataggagaatgaataagaagtgcagagcaacgtgcatcccggtcttctggcgtaattataactcaatttagttacgatgaaggtacattaaagccttactaaccacatatttgattgcctctttggtttattcatttgcaatgagagttcaaatctaaacttgaatttaaattcactcaactatttatctgatacacgtctccatattcaaggccaataaaccagctaaaaggcagaaagttgaatattgtgatacgaaagctccatttagttccttgaattagagacatataaaaaatttttctgtgttaaattctttggtcttgttgaaaaggtatattcatagaatccaattaattaatatactgtattaagattgtgtttatgttaacaaatatgattgtgtttatgttaacaaatataattacagtagaggaatgtgatagcttataattgaaagaagttagatgaaaatataataccccatgtatgaatgtaaatttatgactcttttatagcacttacatcaaagtattactaaaatcttattgatttaatgaaattgctaggtggtttatttagcgccagatgtttttgagaatcagtacgtttcaggcagtatgaattttgcagcagacgcacttttgcgttgtcctgattacaaatttattatactaagcaaaggttaaaaattaatattatcaaattacaatagtttatcaataaattgaacatcgagacgatgtttcccaaaacgggagaatataaattctatattataaccaatagggacataagaagtgatatagtctgaaagatagactttaataatcctgataatcaaagagattaaatgaaatatgagtaataatttaataaaccaatgttgacagaaaagcagcggtcattaaaaatgatgggataggatcattaattaattaattatacaacttctccactaattgatttagtcacactagattacaactaagaagtgaatgataaaacccccatatgaagaaattgtgtgtcttgcttgtaagataattaattattgttttttaagtatataaataacatgtataagctcttctgtgcgtgagatctcaatatatgagagttggctttggggataacactatatcaagttttatctgaactaactattcgcataccacagctccgccgacagtatttgcagtattaagtacaattataacaactataactcttaattgtattgcaaggatgtaacttatatttcattaactgattaagttatattttacgtgcaacattttctacatcctttaatactttacatggtcttaaattatatataataacagcacacgagaagtattgaaaacacttgaaatcaatgctttctgcttattgtaactactatattttgtcggtttaatagtaatcctcgcgtatatatactattgtagtacacttgaccatgaataataataaacaccatcttgatattattatccgcgatacagcggtcaagtaccaagtgttgtacttaatatgaacgtagttctaagaactgtttatacgtacctgtctgtatcttatgtaataacttctataacaatcggggtgatagatagtaagacttagtttataattaacttcgttatagaaggaagaactacaaagtatatagaataattagtataaagtcgacattaatgtcgagaaaactttttacctgctaatgatattcatcatatagcgacaaatttttcatatttgaataacatatatgtttaattgttttgtgattctaagttccaaatcattttttttacttttatagcattgcttgttgaaaaatataatggtcttaatcattaaatatgccatataagttttttcctttgttaatacttcaacaaacagtttttttaaaaaaacatcgatttctaattcattcaaaattatttcactgcccctttacaattaaaaaagacgtgatgaacctactttttaacctccacgaaattggcaggggtgatgaaattttaacatccctgtttgtaattcaaacaattcattatagtcaacatggttttgatttgtgattctacccatccaaccaaagcatgctacccaatccaattttctacaattttccatttctgtgttgaattggtaactctaagcaagactaaataactaatagtaatattgtattattaagttgagccccgacgaaccaataagatttgttgaacggtaaccgctctagactttcatctatttatagtaacaatgaaacatttgtgcctcaacaagatttaactattgcttgcaattctgaaaggaaattattagtcaatgttggaatttttagtataagtatgaagaagagcaaggtttgttaatatttcttttacgttgtttttttttaagtttttttatttctttattatttagcttattaaaataatttttacagttgtaaataatggaagctgcatttagagtaataagattacaaagtacctactagtcctctctccagcaagtacacccccccaattaaattacactgatgtttatggttctttttcaattaaaggtagtgatgataaaaagtttttttattaactattgttgatgattattcaagatggactcatgttgttccaattcacaagaaatcaaatgttactgagttgatcgagtcatcaattcaaactgctgaaaatttatttgctgttaagggatataaagctgcaattctaagaatagagagtggtggtaaattttggaataatgaaatgaatacccaatctcaaaatggtgttgttaaaagaaaacatagaatcattcaagaaaagtttgcactttgttgttttcagctggtttacttgagaatttttttggtctaaaaaactgctgaatatttatcaataggtatccggctaaaaaatgttattatttccaacaatgttaagtttaatgataaagcgtttccatacaaaacatttgaaaatttacctatacctaataagtaaccaccatctggtgttaattttggtgctaaaactggtggtgcagtatttgctttgggttctggtattttcgttatggatacggattcaggttatatatcatctgatgagccgaatactacttccaaatcaactaaatagaccacatctcaaagtagatcatcaccgtcagttttatatttttgaattcatctccaatgaacttactaatactgattccctagttaatcaatctaatgctcaagttattggtgctaggtcggcatcaagtgaaacggatacctctaatcaaacaaatggtactatttctcaaaacaatgattataatatgttgaatgatattcaaaatgatgattcatttactggtgttttgtctggtgttccttctgctgttccgtttgtttctttttcatctgttgattctccatctatggtttcttattatgctatgctccatctgttgctcaatctggttttgaacttcctccctctgaattatactttgaacgagggaagattgattttggttatattgatgatatgttattctgagattgctcataatcttccaattgatgctgaattacaaactcaccgatgatgaacaatcctcttctccattagttagaacaatttcatctgttaccgattaccaaaggcgcacctccaataagagccaatggagatctaggtgctatttttaaggtaatccaagatgcatctatgttttcagttacaaatacgactactacaactttaaatcaagttataaatttgtctgatgttgacttttggaacaaggcaatttgcaaaggaataaagagcaagtagatgtcactaggtttttaatattaaagacgatactaatgtacctatgtttaaagcttgattggttgcccaaaaatttagacaagtccaagatgttgattattgtggaactttcagtcttgtggttagatatgagagtattcgaattttatttggtatagctgcacaagctcaattagtggtacatcaaatgctaaaagaagaaatttgtatgatggttccagatgcaattgataaagtctttatagtttgaaacaagctcatctttcctgtaatatagaaattaatgatgcgacaatctcagctacccttaaaaggtcgttatttgaatttggtttatattctgaagtgataaatgctgaaattcttttagttgtactataatttatgttaatttattgattttgtctaataatatggcactgattaatcaagtcaaattagtactgaatttaaggtttaaattgaaggatttagttttgttaaatacgtttttggatatagaaatttcataaagtttaaaaggtattttactacatcttaataaatatttaaacaaaatttgtactcaattatcacatggaaatgtaaaaagcaacaaactattgctttatctttaacataagctgagtacatagcattacgtgatgcaattaaggaactatttcagttatatatgaagataatgaagtttgtgagttgagtttatcatcaaagaacaaaacatattgatattagacatcattttattaaatttcacactcagaataataaagtttaaatcaattctattattaccacttttatgattgctaataaataaatgttaactaaaagtttgattgtggtcaaactcaataaattttttatatattttatttgcttttcatatgaaactttactgtgttgagattggtaattctaagcaaaactaaataatacataataatattgtattattaagttgagccttgaaaactgattagatttaagtattgcttacaaatcagaaaaagaaacgttacaaagcagaaaaaagaaacgttacaaattaaaaaagaaacgatagtaaagattggaattctaagtataagtagaacgaagaattcccaggtttgatatcgagtctgttgatattttgtataatcttagttattttatagtttatgtagtttgttcttttaatactgttgttgttgtaaaatatggatcctgcccaaagagtcgtcagattacaacactagactctggatcccattgatggtgctaatgtttttgaagaagcttcatccatgttgtaattcacagggtgttcgataatgacattgacgtttggttcaagatcgattattattttccctgtatttacatttattattttaggttttgcaacctttaacatttcatttgaaagagtttcttcaatggtaatattacttccccatattttatgatttttatgcagaaaaagattgaacggatatgttgaaatcaatccatttgaaatagtgtctggtatttttatttttggtaaagttccaggtacagctctatttgatagtatgtaattttcaacatatttgtaataacaatgataaacgtagtgatttctgatcataacattaataattccttgtaatgagtgtgagattattaatgtcaaaggatgttcatttataaattttaacttctgtttaatagtcgttatataaatgaaatatgctcttctaccttgaagttgtttaccaaggtcgatcagacccatacccccatttttgtgaggttgatgccatttgattcttctaactgcaattttcagcggtaaatatttaactaattcttttttaacataagtttcaaaagaatttaaaagaggatccggaattggatcatgttggtcaaaataatagatagtggaataaatgtaagtattaacagctactactctttgatataaatttagatctaaaaacatagttttccttagtctagttttcaattggtttattttattgtaccagttgattttcaacaaggggattcctagatagataggattttctttgatatctaaaattgatagcttcaattgatttatattagcaaattgtttgatattattgatacctttattattaataaaaattattgattttttttcatttattttaagatccgaaatttgagcaaaattatttaaaattgatagtgattttaatagttcattattgttctggtgaaacagacatatatcatcagcaaaagctagaatcttgataaaaagcttagcatttaaacctctctcattgtatggattgtatttcattcctctaattgattgatggagtttaataatcagtggttgtattgcaagattgaatatcaggggtgagaaaggtaaaccttgtcttacacctctccttaatggaatattaaatttatggatccaattttgattaactatattagccgatgctaacctagattggttaatagttgcttcaatagttgaattagggaacccaaatttttctaagatctttttaagatattgatgatcaatagaatcgaaagcttttttcaagtctactaataatatatgttgttcattggataatgatggtgatgaattgatttgattagcaagaatccttgcagtttcaatatgtaaatgaatatttctgtgaagcataaatgcttgttgatgatgggaaataatcctgtttgcaataggcattattctattagaaatagaaaagttgattaatctaagtgatgaatttgtaagactgataggacgtagatcatctattgatggaagatcttgtcgataactctttttgggaattaattttatcaatactttaccaatcttatcagttgtggttaaattgccttgaagaatgtaatttgccatgttggttagaatcaccgcagcagaaactcggttgtttttccaatctctgtaagtaataccatcagtccctggtgatgatggaccattttcatttagccttagaagatttttatatatctcttgttttgaaaaaggtttaattaaatcatttttctctttctcagttaattgttctttaatattttcagtgaacttgtcaaatttgttatttaaattttgatttgaataaatttcatttgatgcgaaaagatttgaataaaatgagttagcatcagttataatattttcatccaaatttgcttcatttgaatgttttacaaatctaagtctaagtctcttgaagctttttgagagattagctgagatattattgaattgaggatcattaaaatcaaatcctaattctttagatgatattttttccttatatgaaggtaaaaaatgtttcattatctgaattactttatttgttttccagcaaactctttgcatatatgcattataatccattgatgggtttttagtatccagaatctcattggtgaaaatgtatttatataattgtttattttcaataatgtaatcaggaattgatggtattcttttgtaaaaattatccttattaattatattattattagaatttgatttgatatctgataatgtacatactaccggtctatgtgttgtaaacggtagcttttgatgtactctatatttaaaattgatatttcttagcagattgaaggaaacatggaaacggtctagccgattatttgttccatttgaaccgtggttggtgtaacatatacttcttctattatttggaaggaagaaaatatcatataaattattttccattaattgttgatgaagaaatgattcaatacgatttaaatttgttgcttccataggatgtgtattccaatcaccacaaatgattagattgttttcaccacgagataatgatgataaagttggacataatgtgtcaataaaatcttttttgttaatgcagtggaatctgttatcattaacattattgtaaactggtacataaacagagatgatagttaagttttcttgtttgaaatttatagttatatcacagacataaaagtttgcaagttgattatcacgattatgccttggaaaaatattatttgaaatgatttctattgaagaatggtaaataattgctgttcgatgttgaacagattgaatcgcaattttgaagtcgaaattggataataattgttgaattgaagataattcagttgattgatttagatcaaattctgtaagacacataatttgaatttttttattttttgcataatttagaatatgaattaatttagaaggacaactgccttctgaatattaaaatttaaaatttttaacttattcattatgatattttatatttttttttaatttttatatttttatattttattaaacttgaagaattaaatgaattagacttgtgagtctaaatccatttgagatttctttttttcaagtttctcttttctttctaatgccatttctatttttttagcatctaataatgtaccagttgctacactcttaccttgtttagaagatttaactaatgttttggcatttctaggttgagttggagtttttggcatacttcttgtagtttcggcatgcttagtttcaacaaccatatcttctatctcttcatcactatggatgttttgccagtacttggaaaggattgaccgcattatcaacgttactgactattgatgatgataaatctgacctagataagttcttaagtttagatagaatagagaagccatctgaatctgctttgtcattattgataacaacagctgcatctaggtttaaaatgtttgtagaggtttgagctctacttcttttcccattaccatttgtagttgatgttcttgagcggtaatgatcttgagagagtttttttgaaaagattctctcttgttttagggtggagggaattgaatagcctttcttgttcagcctccattgattttggacagaaaatttccctgtgaccattctttggaatttcaccttctttgaccctatgtttttgattataacattttctacaacttggtttcattggacatctagctgtagtatgatctgtacatctacacacaatgtgtaggtgcagtggacaaatatgttgtaatttgaactttatgtgtttttccatccgttgtgtgtgagatggaatgaattttaggtggtaaaactgatgattttagttttaacactgtgtagataactttattttgttcataaaatttgatgttgaacgccattttggattctttttcttgtggtaattcacaagacatgatttctccatattctgaatagagatttttgataatttcattatattttgatttaataataaaaggaggaaattctgtttttagaacaagttgattttgttcctcgaatgattgatctattaagttaagatcataagcaataaaagtttcaactaacatggtggaaactaattgtgataattccattggtgaattggccaatggtagattgattttcatgctatacttattggtattgaacatgtttgcaacatcttccgttgtattctcagttgatgttttgattgatttgttcctattattaggaacgttataacgttattgattttattatttattaacttgtggttattgtttttagccttattgttgtaatctaacgactctttgagcaggaaccatattttacaacaacaacagtattaaaagaacaaactatataaactataaaataactaagattatacaaaatatcaacagactcgatatcaaacctgggaattcttcgttctacttatacttagaattccaatctttactatcgtttcttttttaatttgtaacgtttcttttttctgctttgtaacgtttctttttctgatttgtgagcaatacttaaatctaatcagttttcaaggctcaacttaataatacaatattattgtgtattatttagtttcgcttagaattaccaatctcaacagtgtgaagtgtgagagcctaagaataagatggaagccttaccggtatttgaaatcccagtaagtatcttctatagtattctcattttcccattgtaatatttcaggtctcttggcataagctaccctatgacaatagacaagaaatttaatgaatttgttgataaatgtaattgatgttgtttgtgatgttggcggacagattaaaatgttagtggagaattgtggtgtatttcgttgatttgattggtttttgataaatttgaatatgtggatggtgatgttgcattcattaataacatgtctaattggcgtcccgttgaatggaaggccgcataggcagctactgtaaaatgtattgtttagcaatccggtgttaagtgcatataagtagtagtaatcttggggtttggtgaagatatgttgattgatgtggttaaagaagtttttccattcttggtcaccaagctgtgcattgttggcccaagttttagttttggtgttgatatagttgatgttttggtggagtttggaagatagatgattcaagtcctaataaaggatatttgaaggttgttgggattttttttattcaaaaatcgattctgcaatttggtttgtaggatattgttgtatgaggttatggtttgaggctggttgatggtgttgcaggtgatgtgatcagtcatttccgaatcgtagtgtaacaatccggtgaaaaatataattaaaagggaaaacaaaaagccacctcagaagacaacaattggagggatggccgagtggtctaaggcggcagacttaagatctgttgggcgattgtccgcgcgagttcgaacctcgcttccttcattaattttttgaagcttttcaaagcattatctttaacttggttttttagttttaaatttcaaacttgggtaatattaatttttagtttagctaaaaaatttcaatgttaatgggaaaaaagttttagtttctagagttgttaaattacttgttgcttcttttgccaaaatgctcaattttatttgtgttattactacaattaagggtgaaattttttatccacaataagtatctattaaactgatttctgtcaattaacgaaacaaaaatacaaaagatctaaaatatcatagaattatagttgtcaaacaaacaagttaatgtctgtctatataaattatatagttatgttacaatatccagaattttgagaactagtacaagtattttaattcatgcctgttatatggtcgcaattattgaaatgaaaaatatacctaacagatacaattgtaattgcataattgctttcaattatacctgctaaacaatatagatttctcacaaaggactaccaccacaattcaacaggttatggatgcctcgtctcatttgcgtccgaagtcatctattgaaatcggctaaaaattattacaattaaaataattcataccgttctattttatctacttttgtgaccggattattggaattttttgttgacggtgaattgtaagttatatttgatactccgggctgatggttcgagcgttgttcaacttacttttctttttaacccgggccgttcaagttgtctttattaataccgttgatggtaatattatttccaggtatcaatacaaaggtttgtctttctgctcgtcaactttatttaatggttagctcatcctctttgccatttgataaaggattattttttttaaagaccatgtgaactcaatttactcatggtttaaccattgatcatctgttaggtctgttatatcttcaaattttttgtgattctttgttcaatttaagaatcttagatgctgctgatctcaaaattagtttatctgcaattgaagcatctcttaaggatattgctacctcctcatcttccaatggtgcatcttctgctcaagctgttattgccaacagacgtaagtctaacaatagaagatccagaaatccaaaggattttatttgcataagatgtcaacgggctgaccatatttgtttaaattgtactgctgctgttcatgttttaactaaaattattggtatgaataatgaaggtgctagtgatgttgcttgaaaagttcttccaccagcagttcatgttggcgacacttatactctgattctggtgctaatcttcatatgactaagaattttgaacattttagtgattatgtttctgcagcttctgttgaaactgtttctggtatttcaggtgataatttacaaatcatgggtacaggtactgttatttccaatggtcataatggtcaaagaatttcaattagcaatgttgcttatgttcctaatacttcaagaaatttaatttctatcaaaatgattactagaaacactgatgctagattttcttttgatgatagatactgttacatgcaagatggttcagttattggtgaatattttctagctactttatatcaattcattttttcaccaatcattccggaaaattacagtttaattgctaatactttaaatatgcattctagattaggtcatccatctggtagagggttatgcgggaattgggctattcttcttcatctgagttcaaaatttaaccatctacttttaaagcaattcatcatcttcaattgatttattctgatgtttgtggtcctattaatgttcctggtttatctggtgaaagatattttttaacaattgttgaccttcagttattaaacaatttattaatttttctgaaacccgaattttgcaacaatgatttaaaacactatttacaagataaaggtattactcatcaacttactgttccatacaattcatctcaaaatggtgttgctgaaagaaaacatcgtactgttcaagaaaaagcaagaactctcctttctgaatctggtttacaatttaatttttggtccgaagctattaaaactgctgagtttattatcaatagatatccgcctgatgttctcgatggtaatactgcttacgaattatggatggggggggggggggggcttcctaattattcaatttttcatttttttggttgcaaatgcatggtattaattccaaaggaaaagagggaaaacatttttttcaccagtctcagttgctggtatttttgttggatatagtccagcacataaagctcacagggtttttattcctaggattcaagatgttgttgtctcgaataaggtcaaatttgataatacctatttcccaatgttagactctaaaaacgatattcctattatggagaacgtttctccttcagatattttctatggttgtagtgctggtatcatcatcatcatcatgtgcttcagtttctgcttcttttttacctatgatgcaatcttctgatgttgttccagataatattgaaaagattcctaactctcctagtgttcctgaaactgttgcctctgttccaatttttgatgctattgataatattatttcacaagaagataatgatgtttccaaattttttcctgatgaagtcaaattagtttcatctggcaatgaagaatttgattctattcctaatgattttgcttatccagattatgatgaagttcatcaagttcctattgaaccctctttacttccattacgttgtcttcagcatctattactcaacatccactgcaaaagccatgtttcaaaccagaaacacttgcttcatcatctacatcatctactacaccatcatctaccacttcatcaccagcacttgctccagctcaaccacctgctattgttccaatgcaaaggtctttgtctcagctctctaatattgttgattcagttcctaagcgttccaaagcattatttttaggttccaatgccattcatactgctttttctgcatctactactgtttcatctgctttaccaactacttttactcaggctgttaattcacatgacagatccctttggttatctgctatccaaactgaattagatgctcatcaattgaatactacttggtctttggttcctcttcctgctggtcgtcgtgctattggttgtcgctgggttttcactattaaagattcaacatcaccacctacttacaaagctagattagttgctcaaggttttaggcaagtttatggtttagattattttgaaacattttccccagttgtcaggtatgaaagtattagaattgttcttgctatctcagctcaatttgacttaaagatccatcaaatggatgtttcaactgcatttttgaatggtactttgaatgaagaaatttatatgatggttcctgatggtgttgatgctccttctggtatggtttgcaagcttaataaaagtctttatggtttaaaacaagctcctttttgttggaatcaagctatcaatcaagttttattatctgctgactttcaaaggtgttcaaatgaatatggtatttatactaaggtgttttctggctctattgttattgttgctctttatgttgatgatttattaatttgttcaaataatcctgctgctatttctgatgttaaaggtcttctctcttctcactataagatgaaagatcttggtgttgcttctaggtttcttggtatgaatttacatcaatctgaaggaagtgttggtttatctttacatcactatctcaatgattatttggttgattttaatatgcaagattgcaatcctgtttctactccaattgctgctggtactgattttttgcctggtgatgctatttctgatgctgatgttacccgttttcgcagcatggtagggaagttattatttgctgctaacacttgtcgtcctgatttgtcatatgctgcttctacattatcaagattcatcaaagatcctagagctaatcatattgctgctgctaaacatgttttaaggtatattaaaggtactgtgtcatttgtggtttggtttataagaaggtatctaattttcaacttgattggttttagtgattctgattgggctggtgataagtttgatagaaagtcaattactgggtatgtatttatgatgtctggctgtgctattacttggaagtctaagaaacaacccactactgcattatcatctactgaagctgaatacatggcacttggtgatacagttaaagaaatactttggttaattcaattgcttaaaactgttggtcttaaattcaattatccacctacaatttttgaagataatgaatgttgcaagttgcttacaagtcatcctgtccatcatcaaagaacaaagcaaattgaatatcaaacaccattttattagagagcatttgggtaacaaggttttcaatttggaatcggttagaacagatgaaatggctgctgatatgtttacaaagaatttgaatagaatgaagtttagcaaattcaactgtaagattggtatgactcctatttgttgagattgttgagattggtaattctgagtgagactgaataataaattataacattgtattattaagttgaacctcgaagaaccaatcaaaatttagtattgctcgcaaatcagaaaagaaattattagtcaacgttggaattcttagtatacgtaccacgaagaattccaaggtttgttaatattacttttactgttgttattttatatactttaagttatttttatatattatgtagcttgttcttttaataccgttgttgttataaatatggagcccgcccaaagagttgttagatcacaacatgaccttccttggaacaatggtctgttcttcaattttgtattactttgctggcacttttgatttaggaaatttttcacctctactaattgtgttaaaaaagcctgctgtgtttggctgaaatttggggcatactattggtaaatattttaccagaaaaattacaacgttagttaagctaagaagtaacgttgatgaatattattgtttgaatttagaagttaatagtcctaaaaaggctatattggtcaaaggacggtagatatttgtcactctgccagtttcaaagaaatggctgaggcattagaaatggctggttataatgttccacacatgaaacatacccgcaactttatgttttgtaatcaagaaaggatgctgctagtttcttaaaaagaatggtttgttacaaatctcattacacgtcccacttccaggaattttatcaaaagtacaatcatttcagattagaaattgttgataaatgccaaacatgaagttaattttattgtattgaagagtagtaatgaagagtttttttgttgagaaagttagttgcaatgctttagaagataaggattggtttgcaaaaagagataaatttttaattgattctggtgctacttcacatgttgttaataataataagtaggcaggatcccgtattcacaacaacaacagtattaaaagaacaaactttataaactataaaataacctaaattatacaaaaaatcagcagaaacattatcaagcctaggaatgttttggctctacctatactaatcttccaacgttgactatcgattattactctaatttggtttgtttcatttgcattacttttctgttttataacactaatgattttgtttctttttctgatttttaaacaattattgaatttgactgtttttttaacgctcaactaacttactcaatgtcattatttagtattcagtttcgcctgggattgcccatcttgttttcagcgtacaacttagaaacatggtgtattttgcaaagtttatttttactactaaggaaggtgtctaatgattgatttaaaatatagctatatttttggcaatgaaaatgcataagatgatttgttacagaaacacaaagaacttagtcatgcaccagaaaatcaaatgaaaactttagggattgaaaatccaaatggcactaagcaaactgtgttgatttttgctagaattaatcattcctgagcctagggtcatacctagtatggcaatcacggttgtcgatagtttagtatatgatcagtaaggaacaacctgtattacctgattattataggattggtcgtcgaatgtctggtgggtttgtctctggtacacaacccgacgagggtaattactatgtagatgcagctaccttactatacttaatagaacaagatttcaacacttattgatatctgtaagtagctcttatttctaacaattttacaattgacagctccacatagtagtcatcaaattggaaatgttgaaaatgctaacggatacctcaagagaaaggttagaattttattagaagagtcaggtttatataagtcattctggaaaagaaacaaatatcaagattttgtattcatttggttgtttgatgtttatatatgtgaatgaccaaaaggtatttttaccaaaactaagaatggcctacttattggttatgataaatctttgaaaattgctttagtatgctgataaaaataaggttgagatacgaatagtggaaatgataccgggcctagttcgcatattggtatgtatggcagtggattatcttgctcatttatggagtctccatcgctattcaagtcttctgatactgacggcgttgctagtggtcattcttcaaacaaaggtaatacagaaagtcagttagacagtgttacagaactgagcaatactaatcaaagagtgggatttagaacagggatcagtattccatcagacgaatcatcaattagtgatactttaaaatttttatgtgatagtgataagataggtgttgatcaagaagttaaggaataccaaacatatcaggaacaacaagttcaaatattagttaagatgatgtttttaacaaaaggaagagaaaaaacattataaaatcaccaaaaagccttctaatcattgtttaaaactaaaccaaaattacctcctgcttcaaagagagtatttttaaaacaatcaaataagtcagaattagaaatgtcccagcgatgaaactaattactcagatgcttcagaaacgttagaagttaataatgaataataatgataataataataaaattaaacagaaacaaattggtttttcaaaggttataatacaaagtacaggtatgagcaaactcaatagataaatcaaatggtactggcgttgctgtttataatttggtaaataaacgaccaggttttttttgaagaactaatttggctctcccaaaagaagatttcaagaagtaatacattagaagtaatatcaaaaactctcaatagcctaggttaaagtgcttactaattttgtgaataaaaataaattttaataacataaataatgtggctcaaatttttttattcaatgatatccaaacagaagttcgtttgatgatggaaacaaaaacttatcgattcaagatgcaaatgtttgagttaaaaaatttatgatatcaatacataaaggaagcagctattagaacatcacacaatggaagaaagtttgtatcaaaggaaaaacctcaacacaataaactagaaaatatactttagtttgtaaatcaaaaatgctaaagatgctttaattgttggaagcagagtaaaaataaattcagtaacaagaaaaagaaataatcaaggtggcatggttcaacacaaaataaaggtgttaaatatttggaaacaaagcaaatgttggagacaaaaaagttcaatgaaatacgcaaaggcttgcaattctccatgcttgcaaaatgcacttgattaaaagtattgtgactacaatcggcaaagagaggcatattaacaaaaaagtggtatcttatatcattatttagttcagcacacagagcaatatggttaatagtttgtcatcccatttacaaaaaaatgaaattattactcaaatgatattttggtgtattatttggtaataattaataatgctctatcattgcaaactcaagcaaaataataggaaagaagagataaaaaacaaccaaaaaaataataataaacaaaaaaaactgaaggaagcgaggttcgaactcgcgcggacaatcgcccaacagatcttaagtctgccgccttagaccactcggccatccctccaactgttgtcttttgaggtggctagtttacttctcgtttttagtattaatgattacgtaatcattacaaagaaaatcttacttttaagttttactactgatattttttgaagcataaagtaaagttaaaattttgaatgtgccaacaaaataatttaaaaattttctcaacctaaaaaatggtattaatggaattttaaaaaagttacttttatgtggtacattattactgtattaaaacaaaatagattagctagcaatatttgatacaaaaaaactgtaacaaaacaataataaatacacactctttgcgcttacgtaaacagaactaataacatccaagctaaccacatagaatgaacaataagattcgcccgtgtagcgtaatggttaacgcgtttgacttctaatcaaaagattctgggttcgactcccagcatgggtgcaggcgaaatcttcaattagtttttttaattttttaatttttttgtaaattactcttctttaatcatcatcaacatgaattttcaaaggttttgagactttttgacaataaactattagtttaatttatttttttggaacataatacatactatacatatttgttaaacatatattaatctaaaccacaatgttaagacaaataacaagaacgaataaaatatcatcaatatcaccaattaatgaattaattaaacgtcaattttctataagtaaattacaattaaatgaaaataagaaaataaatgaagaagaaataggtaataataaagaaaagaaattaagtgcacaagagagggcaaatagaattatttatcatgttaaggcaggttcaagacttttattatcatcatggttaattataattgcaggtggagcaacattagttacaagttatttacttgcaactgaattattttcaccatcaggtgaaacatcaacatttaatagagttgttaatttaattgaaaaggatgaattaagtttaaaacttttaggttataatgatgaagaaattaaaaatggtggtataagattaaaggcatatggtggaacaaatcctgatatgtggactagaaataaaccagttcaagcaactaaatttactggtaaggataataaggaacatatgattatgagattctttgttgaaagtaataaaactattggagttgttaatttagaggcaattgaagaaaattttattgaacaagaattaatatttgtttcaattgatgtcaagggtaagaaacattatttagttggtggacctcaattaacttatgctcaaagaaatttaaatttatttaattcatctaatggtttcttaggtgttaaatggggtacaaagaaagattaatttatgattaaatcaatttcaaattcaattttcaaatgtatatagcaaataatctatgtaagtatttttataaactcaaatcaattccattttttttacctaaaatttacattataaatacatccaacagaaaatcaagaatatatttattaaaataaaattagtcaaagaataataatccattaaagtaaatgcattatttgataaagtaaattccatatcataattataaactaattcatttcgtggttcttcattttcaccttcaattttagaaactccaaataaatatttattccaatcttcaagtacttcttcactacattttttaccatcatgatcataaagtttcatatatttatcaattgatttagtattattactattattaatgtttctaattaacttacctgtattattgaatgaaacaatattggtcactttcattattataggtataaaataaatttaaagcaattgactcacgttgaattttattacaacttgaaaaaactccataatgacctcttttaggatcatcattaattgcaccacaataaacaattgaacaaatatgatttaataaagtattatttaaatgatagttgaaattattataattagcataacatttaatcattgacataatacaatcacatctacttggtctaggtgaatatggtaataaattagtatttaattcattaattgaaatatttgaacataaattattatattgaaatttattttcaattataaatggtgaatcattaataatgaaataatttggcatatgttcaataagaccacaatttaaataatcaccaatgtttttatcaataaaggataaattatcatgatttggagataatattcgaataccaaagggaattttatccatttctttgaaatgtatataccttttcaaatctcttattgaagctttaacatatggtaaattatgaattgaaaaatcattattaaaagataaagagattgtaaatccaaacatccaattgcctattaaatgattattattttgtctattttctaacatcttattatgtataatatcaataaatgttgtcaatgtattataataatcattattccaattttcattattaataatccctaaattaattgaaaaatattcattcctgttattattgggatacttaaaattataacctccatcaactatttgaaataaatctatattccttacattaattaaatcaaaattaaatactgaactatttgaatgaataaataggttgtcctttattatcaacagttattataggtgattcattaaatggagataagaaatttaatgaacttatattaacattaaaaatattataaaattcactatgattatggaaaacatttgcaattattacataattttgtaatataaatggaaagaatatgaatatttgtaaaataactgaagacattgattgtctttaaaggaaagaagatatagggtataatgaaataatgaaatgatgaaatagggcaagacatgcaattaattgtacttaaacaaacccaattctctttaatattgcaaaaactgtacgcaaattgtatcctcttcttgataaatagagaaaccatgaataaatacgaactttaacccaccatttaagattagatttccaattaaccgacaatttagccttttgttcatcaagtactgcaattggatcatcagtaataataccttcaagtaaggaaacagtaccattttcttcttcttcacataactttataattttctgtagttcaatattatcattaactgtccaaaaccaaagttttaattcattatcccttatccaattaattaattcattacattcattttctctgtatattatcatattaattattgaaataccatgaattttagcatttggttcaattttctaaaactttattataaaatgatttagctaattgaatatcaaatgtaatattaataactttaaaatcttttaaattatcataaatataaaaatcccatctccaaataccgaaaataatcttatccttccaataatcaattcccattaattcattaaataattcaaaaatcaatccatataatttaattggatcattagtcagtcttaatatctaacattaattgaattggaactttgtcattacctatcatattttcattaacttcaatacaccaatttaatacatcccttaataatggcattttctcccttggttcaataattgttcttaattgatccaatactccaaaatatggtgttttagtaacatcatattcaataccaaatactcttaatgtatcaatatcatgagcaataattacttgattatctgatgatatatgtaaatcagtttcaacaactttacatccattatcaacagctgattgaaatgcaagtatggtgttttcgggacatgcagatttatatcctatagtcaattggttagtatctagtaattatatatcgtattgtaatacatcatacataccctctatgacctgcaagtaagtagctcatcttcttgttgtcatagaaagaaagaaagaagtaagaaatagagaaaaatgtgtacaacgtggtatttattaaaaaattattataaaattgtaaatttacgtagttttatcttgtctttgttgtctgtgttgtctgtgtttattttatttgataattaccattaaccatctattaaatcagtccatacctttccttttcagcatcattcattctttggaaaaaatcaattggacttgtaaccatacctaaggctctttgacctaatctatctaaatattttaatccaattaaataacttgcattaacccatccaaatccttcagttgcaacacctttaaatcctgatccttgattaccatattctgcatcaactttatgtggttgtctcatacttgttgcatcatatttttcaacaacaattccattaaaatcaacaaatgataatgtcattaaatataaccatctatatgctaatctttgtgcaatattatgataattatatttatttaatccttcccatacaataatttgatgtggtgcccatgcaaatggataatcccattgtcttgatggttttgaaacttcctatatcaccccttgatttacatgtacctgaaactaatccaccaaattcttcaaattttttaattgaattattaactaatttctctgccttttcattagaacatacacctgcccataatgtataaaatgcagtaactgattcataagtagattgttcccttgtttgaatattataatcgaaataaagtgattcttttccattccacatatatttatcaattaaattacgacgagtttcagctctatcattccaaattttagaagtttcaattaatgttttatttaaattatcatcataataaattaaattatcatcaaaataagttttaattaaaaatgaaatatctttctcatatttaaataataaagaatttaaatcaattgttgctaaatttgcacaaataccttctaatctatatgatgtatcatgaccagattctctaactgcacgatcatgtaaaaaaaaatcatctaattgaggttcattaatttctccattattatatttaatttcaaattcttcatatgataaattatatttttcacagaaaaatgttaaaactgaatggaaatgtgatgattcagtttctggtggtatacctttaccatctggatgataagttgataatcctgtaattggatctaatcttggacttgacatccaaacattataatattctttaattgcagctaatgttgatcttttcaataaatctaatgattgtttatcataaccttccttttcaatatctctatctttattaatataatcaaaaatttgaattgccatatcagttaaaaatggaggttgagaacgacataaataatatgatctatttgcatttaaaattttaccataatgattaatttcaaaaataaaattttccaacataccaatacaaggttctaaaatatcacaagataataaacctaaagtttcaaaatatgaatcccaaccatattgttcattaaatctaccacctggtacaatataagggtaaccttctaaatcaccataattatttgatttatgtctaacagctaaagctaaaagacctggtttatcattaattgatttaacaaaatcacttgtaatatcttttggtaaatattcaacttgtaaattaaaatctttatgattttcagcaatttgtttataatagaaaaattgttcattttcattataaggtatataaattcttggtaatttagctaattctgatctaatttttgtatctttagccatatctaaaattgtagattcattaacttgtcttgttaaatttttccaaaatgaagttgtaattaatcttttcaatcttgaaactggattttcatttaatcttgcttcatctaaaatcatttgttttctaccaaatcttttagcaattgttaattcttgtaataaattagataacatataagtacctctaatatcatattgattaaaaccagcagaattaacagtacctaattttaaaacttttggaccattatcatcgattgtaatttgacaattatgatcagtatcttcatttgataataattgatcaagagttgaatcaatatcagaaatgaaaaatctttttgaattaactttacttgaggacatatcagcagatccacgtctacggaaagttggagatgaaggtgaaggtgatgataaaactctattcattggagccggagctgggataggtattcctgaacttaaaggtatatgaggagatggatgaataatactattattaagtccgataccattattactaccatcgatatcactagtaagatcattttcacttttaaattgagttattctattaatagaactagttgaatgagattttattgaaatatcatcatcatcattcttattcggatcattaagaaccggataatcatcatcatcatcatctgatataacgggagtagcaattgatgaggtggataagttgagtaaagaggtattaggagaattattatttgaattattagtaaatgaacttgtgaatgaatttgaaaatgaatttgaaaatgaatttgaaaatgcaaattttggctttacagccattgatcttgatctaagtctagcaaagggagaagaagagttcgaagggtcagtagtatttgaatagtagctttcggcagggtcatacgggttagttggcatagttatgagctttattcaaaagaaagaaagaaagaaagaaagaaggaagaaggaagaaggcaaataaaataaatgagcctcaattcaagaaaaagaaacagagccttcaaaattacccgccccactgtaatttttaaaacttgctttttttcttcaagtctttcttctatttactattattaccacttctttctttcttttggtatcacaatgagtactgataaagctgtagaatctgctaaggttgatacccctgaaactgaaactaaggttgaagctaaacctccaactgctaatgtttttgcaatgtttggtgcaaagaaggaaaagaaggaagaagaagacactaaggaagacactaaggaagaagacaaggaagatactaaagataatgaagataaagcagatgaagaggaaccagatgttcattttgaaccacttgttaaacttgaacgtgttgaagttaaaactaatgaagaaaatgaagatgttatctttaaagttcgtgcaaaacttttcagatttgataataatgaatggaaggaacgtggtgttggtgatgttaaatttttaaaacataaagaaactggtaaagtacgtattttaatgcgtcgtgataaaactttaaaagtttgtgcaaatcatgcaattactaaaggtaatcaattacgtgcaaatgttggtagtgatcgttcttgggtttataatgttgcagctgatgtttcagatggtgaacctgaacctgcaactttagcaattcgttttggttcaaaggaaaatgctgataaatttaaagaagaatgggaaaaaattgctaactagagattattttctattctataaattgtttataaaaaaattgtatagataaagattaataataactatttatcatcaacatcattatcaatatctccatctctatctctatctttaataccaggtcctttccttaatggccatttaattaatattttcaacatttcaaaaactccaaattctggccacaatacatcaataaattcaattgttgaactatcacttgcttcccacaataagaaatcacttaatcttctaacacctgctgttcgtataattaaatctgccttgggacaattacttggtccagtccacatatcattacttatactttcctctgtaatattatcactatctccattaacaatattcttatacattgattgaacaatatctgctcttgatgtataacaaaagcaaacatttaaaattgcataattatatttctctgtatctttttcaacttttaataatgcatttttaacatcatcactaactaaacttaaatctccaataattcgtatctttacaccatatttttcacataattcacccttatttgaaacaattttcattttatttttagctaattccattaatgcattaatttcattatttgatcttttaaaattttcagtagagaatgcaaaaactgttgcacatctaactcctgatttataacaaactcctaatatatttgtcatactatcaaatccagctgcatgaccttcattaatacctgataatttttgtcttgcaaatgttctattaccatccattataaatgcaatatgattaggtactgaaccagttgaaattgcctttgatattaattgtgcactccattctccaatctcctttataacaggaaatgtccatatccagtccatactgtgttatatattatacctttctttccaatagaaaagacattaaaatcaaagaaactgaaaaattggaaaatttaaaaatattgagaaattcatgtagtcagcttcttcttccgtcttcttcttttctttctttaaaggacaaaagagcaatgttatcacgttcattaaaagcaataccccgtcatagatatcagaaatctcttataattataaataaaagactttcatcaacttttgcaactgcaattgaaactgctgaaaaattagttcaacctaaaacttctgcttcatctccattagatccatttgcaatggtttcagctgaaatggcaactttaggtaaacatatctcacaattaattggtagtggacatcccgttttaaatagagttgcatcatattattttgaagctgaaggtaaaaatgttagaccattaattgtacttttattatcaaaggcattatctgaaattccaattaatgaaagaaatagaataattattgatcaatatgatgttaatactcaaaaagaatttaaaggtactccaaaggcattttcatttgcaggtgctgatcctttaaaatcaatttctccattaaatattttacatggtataaatccaaatataattttaaatcctttaagtagaccaatgattgatcaagatgaaaaatcaattcaattagatattaaaaatggtatattaccaaaacagagaagattagctgaaattactgaaatgattcatacagcttcccttttacatgatgatgttatagatttttcggattcaagaagaggtagagaaagtggtaatattgcattttctaataaaatggcaattttagctggtgatttcttacttggtagagcttcagtatctcttggtaggttacgtaattctgaagttgttgaattaatgtcaactgcaattgcaaatttagttgaaggtgaatttatgcaattgaaaaatactgttataaatccagatttaacaacaattaataatgatggtcaattaaagaaaattcctttaccaactggtaaagtacctgttaaagttcatgaatattcaattaatggtacatcaaatattatttctcataatgataatgttgaagcagcatttcaatattatttacataaaacttatttgaaaactgcatcattaatgtcaaaatcttcaagatcaacagcaattttagcaggttgtaatgaagaattaattgaaaattgttatcaattaggtagaaatttaggtttatgtttccaaattgttgatgatatgttagattatacaacaactgctgaattattaggtaaacctgcaggtgcagatttaaaattaggtttagcaactgctccagtacttttcgcttggaaggataaacctgaattagctccattaattgcacgtaaatttagtcaaaatggtgatgttgaaattgctaaaattgcagttgatgaaacaaatggtgttcaaaaaactcttgaattagcaattaaatatagagatgatgcattaaataatttaagagttttacctgaatcatcagctagaagtgcacttgaattattaacaaattcaattattactagaaataaatagtatctttaactttactttactttactttcttttaacgatttaattaatgattcattctttacatagataaacctgtatatacgaaaatttaaattaatatataacatatcctcaacgaaagaagaagaagtagtagttgacacaaagcctgtacttccttttaagtggatcatgtctctcttttatagtaaaatatttggtgtacagataaacagttgagccccatttattgatgatattttcattcaatgaataatttctttaaggacattactttctttttacatgtttgttggttggaataagtataaactttaccattctattataatgaaatctagaaattccgctcatatacctcaagttgttatacgttcatttgcaaatagggattcttatccacaaacaaatacacttgatcaatcaacatttgatgaatatatgaatgaatttgatgaacaatcaagtatagaatcatcatcatcatcaagtgaaaatagtagtgattcagagaaatctaaaaaaaagataaagaaacaaattaaggataaacttaatataatagagaaagttgaaattaattcaaatactacattatcatcattatcatcatcatcacctaaacctaaagaaacaggtggatatcattatttagaagctaaggaagctattaaggaaattaataaaggtaaaagtattttaatttctatagataatgaatttttcgaaaaatcagtttcaaaagtaactgaaattggtatttcaatttataatcctaattatcaacaaaattcattattccctcatataattaatattcatttcattattaaagaatttattaatttaagaaatggttcatttgtacctgattctaaaatgaataatataacaggtcaatcaattataatttcaattaaggatataccaaatgcattaaaatcaatatttgataaattacctcaagattcatttattgttggacataatatttcaggtgatttaacaagttttaaatatcttaattataaaattccaaataattttaaaataattgatacaactaaattatggtataattttattaattcaaaaaatgtaaaatcatcactttcatttattttaaatatacttaatataccacattcatttttacataatggtgttaatgattcttattatacattattagtttgtttaacattatcaagtgaaaatttatgtaagaatttaaaattaacaaaatttaaaaatattattgaagagaataataatagttctgatgaagaagataatttagaaattagaaaagctaaaattcaaaaacttaaagatgagaaaccaccatcatttgatgaatttacaccagaagttgcagatattaaacttaaaagatgggaaaggaaacagaaaaaagctattgaaagattaattaaaaatgaaaaactaactaagggtgatgtctttgattcaattaaaattagatgttcattagatgataaagtaatttcaaataagggtaaaatatcaacaattaaaaaatttaaaaataaaaatccaattgtaaatactttttataaaccaacaaaatatgaaaataatgaattaaatcaattattaaatgaattaacattataatataatatatattatatataaactactttattaaatctttattaactaaagttgcagattttgtcatattattaactttataaataccaactaaactttcagctaattcaaacatattatttcttaatgaaataacaataaattgtgcatcctttgttcttgatttaatataatttgcaacaatactaacatttttaaaatctaatgctgcatcaatttcatccataacatataatggagttggtttataatgatgtaatgcgaaaactaatgctaatgaagctaatgttttctcaccacctgataaattagaaattgtcctccatgatttctttggtggcataactgaaaagataataccttcagagaatgcatcatgagaatcataatattctaattctgccataccaccagctgtaattaaattatacattccctttaaagtaattgaaatttcatcaaaaccagctttaaattcattatgtcttttatcatttaattctttactctttaatttaatttcttcaagattttgttttgtaattttaacatcttcctcttgttccttaaattttttttccttatctccataaattaaaagtaaatctaaattaacatttgaatcacttaattcaatttttaaactatcaattgaatcacctaatgtttttaaatccatattacttaattcttcttcaccatcttcattcatataaatattttcatcaattttaatttccatttgaattaaatcatttctaattttatcatcttagaaatccatgaaatatatggttcaacatcacgaatttcaatattattaatttcattaattgcatgattaacttcaatttcaaaatcttttaacatttgatcaattctatttatctttttcaatgtatcatttgttaattttgaattttcttcaattttaatattttcatcatcaattttttcatcaatttcaattattttattagaaatttcttcatgtttaattaaaatttttttatattcattatcaattttttcatattcttcattaattttattaaaattttcatttaatttattaattatttcatttaattcatttatttgaatttcattattttcaataattttcaaaattttattattttgactttgtaatttagttacctttaattcatcattttccttcatttcaatttttaaattaattgaatcctttaatgattgaactttagcagtttgtgtttttaatctaataccaccaatatctaaaattttattctgtaattcatcaatttgcatttgtaaatgatttgaattttcttcaagtttagatttttcattagaaatgataattaattcatttttataaattttaattttctcccttaataattgaatttcattaacatttttctcatcattttcatttaatattttattcaattcattaatttcagtatttaaatttttattatcaattgttaaccttaaaatttctgatgtcatccttggtatctcttcctcagaattacgtaaaatttgatccatctttctataagaattttctaaatttttataatgatcctctctttcaaataattcatccttcattgcctgtaattcatttggtgaaattatatcattaaaaatatttaaatttgaattagtatttgatgatgataatctcataccacctctattaactctattaccaccacctgtcattgtaccactaacatcaactaatttcccatctaatgtaacaactctccatcttttagaacttccaaatgcaactctatttgcaatttctaaattatctgtaactaaagtatcatacattgaactatagaaagcaggtttaaatttttcatcaattggtttaattaaatcaaataatcttggtacattttcaggtgtatttattttattaaggttaaattttcttaatttttccaatacaataaatttaccaaaacctaaattatttgatcttaaatattgaatacaattttgtgcatcattaacggtatcaacaacataatcatttaatgaaccaacacctgttgaaactgctatatcatatttatcatcaattatacctaaatcacctaatttaccataaaatccattaattctaccagtttcctttaatttattaagagcatttaaaactttattttgagattcaacattagaaactttaaattttgcatcatcaattttattatttaaattttttaattcaatttctaattttttcaattcattaccagcaatttggaaatcttttttatgtcttgaaatatttgaattaaaagtatttttcttttcattaagtgaattaattttagaattatttaaatttaattgttcatttttatcaattaataattttttcaatttatccttttcattaattaatgaatttaattgattttgaaaaagtataagttctgaatttttaatattataattactttgattttgatcaattttatttttccaaggttctaatttattttgtaatttttcaatttcaattgaaaatttttttgtttcagttgataattcagatttaattttatttaattcattattttctaattttaaattcttattaaattcattaatttcattatcataatttaataaatttgaatttaattctaataattcattttcatttgatttaaaatttttattatttgaatctaatgttttaattaaatttttcaattttttattattaattttcaaattttcattaattgaaactttttccttttcagaaaactttaaatcatccttaaatttattaattttaatatttaaatttgataaattattatttaattttaatttttcatctttaaatttatcaatattttttttaaatttttcaatatttaataaatcatctttaattttttcatttaattcatcccttttaaaggtatatttattaattgaaattttatttttaattttagttaaattccaatatttaaaagtttcatcttttaaaagtttctctaatttaagataatctaaagctttatttttagaaatttctaaattatggaaatcatcctttgcaaaattaaatcttttctccttttcattgaaaatatcttgtaaattatcaatttgattattaattaattcaatttcttccttataagttgaagtaccaattatatcttctaaatattctaataaaccatcatcattatcattttcagcctttggtttcatttgagcaatcatttcaacttcaccttgtaaaataagaaatcttttatgatctaaatcaataccttcactttttaataaattagtaacatttgtataattactttgtaaattattaatataataaatactattattattaatagttgcctttcttgaaactatcaaatcactattttcaataattgttggattatttaaattattaccattattatcataattatcaataatttttttaaaatgaatatcaactttacaaaattgtaaatttgggtaattttcagaattatgaattaattcctttaatttagtttgtctcatctttgaagctctaaaaccgaaaacaaataacattgaatcaataacatttgatttacctgaaccatttggaccaacaactgcagagaatgattgatgaaatggaccaatttcttgtttacctgcataagatttaaaatttgttaaaactaatttctctataactaaacgaggttttgcaatattaggagttgattcgttattatgtaataatttttgtattgcctttcttggagattgaattggttcaataccaattactgatatattattattatcatttatgttatcaatactattattatcaatactattattattattaaatatagcagaactattagctattatatcattattattaagttgagtattctgactttctactagcattctacaagtaaggaaggggttaatctacagagaatctattgtctaatccagaaagaaaaaggtattgtaaaacacgtaaaatgcaaatattcatgtaaacaaaggtaagcacccacaaaatagattacgtaatgaacaagtcacgtgacactgccatagcaaacctcgtgtcagcaacagtcacgtgatctgcttacgtaatatcatattataatattattattatcccctcactttaaaattaatattctcagctacaaccaattgaattgaatacattttcaattagtattggtattggtatagcatattattatatcattaaataatcaaattcaattatggctattcatgaattacctgaacttcgtatgtattatatattatatcttattatcttattattagtatcatactaacacattaattatagtatcacatgatgaaatgaagaaaaatcaaattccaattccatttagggatagatgtgcaaaattattaattccacttaataaatgtagaaaaaatggtggttatttaccttggacttgtgttgaagagagacatgattatgaacattgtcaatatttagattttaagagaagaattaaagaattagaagaatttaaaaagaatagagatagtactgtataatagagagtacgaagtactctcttttcatatacttatacaatcatatcatcatatcatcatatcatcatatcaattatatagattataatattataatattaaaagaaaattatttatttcctaattgagtaattaatttattatatcccctataccaccataccaccatttcctttttaaataatggttaaaacatatccttcaatatacttatcaaataaaatacctttgataccttcaagtccaatactatcatcatcatcttcttcacctgtaaaaaaaattttaattaataaatttaatattacaattgataatagtgtacaagaagatgatatcacagaagagggtaatattgtagataaattaaaagataaatcatttcataatgattttaaattatctaaatttttagataattttaatcaaaatggtatatatgatttaggtttagatgatataagttatagtaaattaagtgaaacatcatttgcaaaattcaacattacttatcaattcttttatattaataaaattgtagaaattttaattataatacccaatacttcaaatactaatattaaagatttattattaaattatctcaaaaataaacttatattatcaaatacaaataatcgtaaatcaaaaattgtaattttaactccaagacctcaagcttcttggtttaaacgtaaattatttaatcttaaaattacaaatataaaaattgatgataatcaatatatcctactcaaagtttggaaaaattatgctcaaattgttaaacaatatttagatgaaattttataattatagctatatatagtaacttaccatgctctaaatggaacccaaatatcaataacttttgcattttctttatcattatcaaatatataataccatggataacaagcagctgtaatacaactatgttgtggtaaaatttcaactcttgtacttaatggtattaatttacaattatcatcattaggtattaaaattccatgttcttgacttaatctaccaataatccaatctccataaccttttggtgaaataatattaccaaatcctttaattgattccaatttctcttgaaattgccaatactcctgcattaattaattgttcaccaggttcaatatcacctctattaggataatttgataaaatatctgctaaaactttacatgaaatttcatttggggatatacaacctgtacctaattgttgtaaatcattaaatggataattacctgcatgtaattctaattcaccaaataattccccaatggaattaatttcattattaataattttacttgaatgacttgttggtgttgaaccaattgaaataactaattttaattcattattaaatgaaattgccttttcacatgctttattaccatgattaatttcttcaattaataatttcatagcttgtttaatattctttgatccatatgcatgtcctgcatgacaataaaatccatataatgaaataaatttcataaattcattatcaattactaatgatttaataatttcatctaattcattatcatcattagttaatcctgcacgatttgtacctaaattaattttaatgaaaactgaccattttttcaaattcctattcttttcactaaattttttcaaaatctctaattgtttaaaattatcaatcattaaacgtaattttaaatttggatatttttcagtaatttcaaataattcattcaatttactttcaacaactggtaaactaaataaaatatcattaattaatccattatcaactaatgacattaaattccatgcctcatttaatgttgaaacaattattctatctgtctttaaatcacttgtacctaattgtaaaattgtaccttccttagttttatgagttttaacatgagcacggaattttgcattaatattcttagcattatttaacattttatcacaattaatcttaacttgattttgattaattataaaacatggtgttggtaattcattctttgttttacccttaaattcattaattaataattgtttatcagctaatggtgtaaatttatatggatatgacatattggtttatttaaggaagttgataataattcatcatcaccattattgaatactatatcatccttttatagacattgatctgaaaataaagaaagaaagataaatgaaaagatattatattaaaaccgacttctcaaccgacatataaaatgtatattttcatcaacttttcctttccttttgtataagcttatttaacaacatttactattgggttttattccaaagtcgtatcctcaaagaaaaattgatgttataagctttctctgacacatgaaccgtgaatattggaaaatatctgttatttatttcatatatttttcaatattcatcgttttgtgccaaatacagtttataacattaactttgaggtaataattgttcacactttaacctcccccccccccctttatataatcttttataagtttaaataacaatgattctaataatttacagtcagagagaggtatcacatttttacacttctcttcttaacccaagaataaacaagacttctttctggaaatggtccaatttcataaatgattgccatatttttataatatttattctcaattgcattaaatatttcaaattttggttgataattatcaattgcaatatttttgaaaatcgttttataagctttaaagattcaatgaaattaattctatcttcacttttttcacaataatttattgaaggtgcaaataaagtacatcacgtgacccacgcacatgaataataaccatagtgaaacccaccacatattttcacactgtaagtaatatgaagcttattagtgatataaagtgaatatctatattataatcaatagagacattacaagtggtatagtctgaaggatagactttaataataataataatcaaagagattaaatgaaataagatttaatgaagaaatatgatgaataatttaataaaccaatgttgacagaaaatcaacggttatgaaaaatgatgggataggatcattaattaatttattatatacaacttctccactaattgatttagtcacattatattacaactaagaactgaataatagattccccacatggagaatcgggctggcttgtgagataattaattacagttctttaaagtatataaataacatgtataagctctcttgagcgggacatctcaatataggagagttggttttagaaaaaaaagaagttttggataacttattgtctaactttatcttaactaactactcgcataccagttccaccgacagtattcgcatagtagtattaagtacaattagttacagttataattctttattgtattgaaaagattcaacataagtattaattatttgattacgtaatatttacgtacactatctacaatatcctcctaatactttacacacacaacaaaaagccgttctagtatagtggtaagtacgcatcgttgtggccgatgagacccaggttcgattcctgggagcggcacttagtttttttaaacggctcatttaacataaacataatcaattgaattgatttaacatgttttttacttactttaataacttctttctttttgcattctttaataatataacctaatgtcaatacctatttatatcatatgaaatgaaactttcacttagaattgatcaagtaactaatttaagacaaatattaggatttcttttattaattaggaaaaattgtattttaaaatttcaaattgatcaaattaatataatttcaattgatcaagataatttaacatcaactccaattatatggtgtactattaataaaaaaatttttaaaaaatatgaagttatagcaaaggataatttaattggaattgaattaaatattgaaccattatttcaaattttgaaaaattttgaaaaatcaatgtcaacaactgatttaagtattaaattaactagaagtgataatactaataataatagtactactactactaatactactaataataaaagaaatgtttatttagcattacaatttaataatagtattacaatgaataatgaaataactcattcatttagtataccagttgatttattaagaatttcatcattagataaaattagaatgccaatattaaaaaatattcatttgataattgatatgaatagaactttaataccattatttaaaagaattgaaagatataaggcaactgaatttattaatattgtaattaataaattaggtgaattaaagattaaaatgcatgatgatggtaaaaatataagtttaaaatggaaaaatttattagatacttgtaaacctgaagatgttgatacacagattaataatagagatgaaactgatttagatatgattaatgatattaatattaaaattagaactaaatggtggaattttgtatcaagattacttgaaatttgtgatattttaccattttatataattgatgatggttgtgcatttcattgtaatgttgaagatgaacaaaattgttcaatagattattatatacctggtaaaattatataaatttagatacctactaattagtgagtttttgcaaattcttcaataaattcacataataatttagttgatttaattgtaactgcattatataatgaagctctcataccaccaactgatctatgaccctttaatcctgataaattctttttttctgcctctgataaaaattcattatctaaactaccatctttaatagtgaaaacaatattcattcttgatctaacatctttactaactggtaatttataaacatttggatatttatctaaaatatcataaagcatatttgatttagtaatattttcctcttcttgaacatttaatccacccttttcaattaaattttttaaaactaaattaacaatatgaactgtaaatgttggaattgtattataagcagaatcatttttaacaactgttggataatgaaatgcaattggtacaattggtacatttaattttttcaattcttcaacatttgcttgttcaagtaatgatttcttaataatataaattgaaatacctgcaataccaacatttttttgtgcacctgcaaatataagtccatatttactaacatcaacttttttagataagaaatttgatgacatatcactaactaattcaacatttgggaatttatcaaatgggaaatttctaaattcaactccattaacagtttcattatcacaagtgataaataaatgaaatttcatttaaatttgatggtatatcccatttatcaattgatggaattgtaccaaatttaccatcaattttctttgtatcaactaatattttaggattataacctaatctttcagcttcctcatatgcctttttagaccatgtaccatcaattatataatatggtgtaccaattttaccagttttcttaatatgagatgcagttaaatttgcaacaattgatgaaaatcctgttgtaccaccaccttgtaaaaagaaaacttcatgtgtatcaggaatatctaataatttagttaattgttcctttgtttcatcaataatggaaacacctgctttagaacgatgtgaaatttcacctgctccaataccaatattttggaaattaattaaatcttttgcagcttgttgtaaaactgatgttggtaataatgcaggtcctgcaccgtaataattaggttcctctctatctaatgacattgtatagtttgtgatttaatatatgattcaaaagaaaagaaatgacataaatacttcatataatgataaaatttcattgtgaaaaataatttgatttgataattagataattaatcagagtcaattaacttatttaatgagtcatttaatgtatatgttatgttaagtatggtatatcatctatatacctacatcggactaatacatttctaaataaataaagtatataaataatataataatcatatataaactattgtttcttatcatgttcattaaacttattataattttcagccttttcataaattaaaccttcaattttaccatctttataaatttctctttgcttaaggaaatctaatggtaataatgaaggccaattaacatattgaataccatttttaatcatgaaaaaaaatgaaaatccacttaataatgacataattgaaataaatgaaatatttttaatttcccaaattgaacctttagggaacattattgtaccaattataattaataaaccaacaatgaaaatatatggaattgattgatgaaatgaaggtctttgatctttaaatggtgaattatttaatttatatggtaatatattacctaaaaataaatcaaaaccatcttgtcttgaaccatctaaataattatttttcaaatatcttgtaattgaattaattaaatcatttaatgcacctttctttgttcttttaccagttcttgtataatcagtttttaatgcacctgtacctgaataagcatttgaaacataatctgcattatctgcccaaatactttggaaaattaaattaaatttaaaatcaattttctcccattctaattcaccattaattatttgattatcaattaattgcctttgtaaaaaccatctacctaacattgattgaacaacattagttctatctaaacaatccatacaattagttctaacaatatgactttgagttttttcaattataaaattttcattaattgtaaataatgaataatcattttgtgataatcccatttcaattaaatgatttaataataatttaactctatcccatctcattttactacattcatgatggaaatcaaaataagtatatttaatattttcatcaccaagggcagaaattgcattttcataagctaatttaattggtttttcataacctgattgattaactaaattaactaaataattacaaccataatttgaaattgatttatcaaaatgtaatctagttggtaaaatatcattaccatcagcaattaataaatttggtttatattttaaattattcatttccccccaataaacaggtactgaacctctaatttgtaaataagttgaaattttatcaccattattactatgattaattaaaaattgttcagtttcattaaaatttgcaacattaccatttttatcaatacctcttctaaaatatcttgtaccagctctaaatcttgatcttcttgtaattaaaccaaatgtaattggtttttgattaattgttgtctttgtaaatttacaataaccataaataactggtaatataaaattagatataattaaatttgaatttgataattcaactaaatttgatgaaatgaaaaaattccacataaattcattattaaaacttaatgaattttcataattttgtttaccaaatgaattagttaaatcatatgtatatgaaaaatataatgttgcaatatttaaatgattttgtaaaatatttaaatatttaacttcatcttcatcaggttttaatttcttatttaatggtaaaataattgttgaatctattttataaatggttttatcattataaatagtaccaacattagttgcacctgctgcaagaatgatataataattagaattaagtctaataacacctaataaacctgaaattgattggaaacttgtcttaaaagtttgtttatcaacatcaactgtcttaatctcacctgattcattaataagtaataattgtgattgtgaatcaccagctaattgaaatacataaccctctgcagtctctgcatatcttaacgatgtagtagctaccatctctgtctacaaaagaaaagaaatcaaaagaaattaaaagaaaagaatcatcaaaattaattatataagccattatataacctacagtctcttcctttgacgacgtgatcttataccattggacttcctaactaaatggtcaatctccctacgtttaaggtctaacttcagctctgcactcaactgattctccttattattatcattatcatctctgttatcattatcataccctcttctggcaattatcatatctgcaagtgttacttcctttgattggataagtttacaatatacatcaatattatcactaatacattcaaataccatcctattatcaatctcctcaatcatcttatactgagtcatatcataggcatatctactcattgttgtgaatttataattaggttgacatgtcattaaatcaatttgtgttccaattcgaatcatttgataaatttcactcatatgtctgtctttagcaattacatatacaaaatatgcatgattaaaggattcttgttgaatcttaatcctaccttcaatccatttatcaatattatggataattctctcaggattatgtcttaatgtaaatgctcctaaatatttagcaatttcaattttaaattctaatgtatcttcaaatttcattaactgaaatggtataactccactaacactattatattctccacttaaaatcatatcaaatatattacccttaccattaaatgaatgttccataatataataattaaatttattcttatatttattataatattcattaaaatgattttcaactctttccattataattgaatgaatatttttccatttaccaactccattataggttataaacatttcaatgaaatcattactattcatataataaaatccagtattatcatcagttatcttatagagaagaataaatgatggatcatatttatcattaataccatctttaataatttgatcaaaattaagattatatttggataccttatcactgagttccttattctctttaataaaatcaataaatgatacatcaaatgaataatgggcttttaatctctcatatctcatatcattaactttatccgttattctctttaacttctcatcctcttcatcatattcatcatattcatcatcattatcatcattatcatcattattatcacccctaatagcccttttagtattctcagcttcaagtctagctgaatgttttaaaacatctcccatatgtctaagaagaaactgattgccttttcataaactgttccttatctattttaaatggtatattctccaaacaatattttgttaaaactggtggttgtgattggagttggtgacttttctttattttatcatcagtatttatcttaaccatttgacctttatccttagatattccatcaatattaatttcacttaatgcattaaaattaaataaatatccaacatttttaatattatcatcaatttttatcacaattattataattataatcattattcaatgaattagttaaaatttccttaatattattaatcttaatcaattttggtttattcttaatttgttcaatatattcattaattatctttttcttaactaaattatcaactttaactttccatccaactctaataatttcacccttagaattaattgatctaaaattatttaaatgataaatatctccataaatttcaattaatgatttataaaattcagatgctaatgtaccttcattaattaattttttatgaacccaatcagtattaatatataatggatgagttatcttaactaatggatccttaattctattctcaacaattttcctaatatttcgaagtcttaattcagaatcttcatattccttaaatccaatatatcttgatgcattagcaggtataggtattgaatcatataatttattattcattatatcattttctttatcaattgattcaatgaaattttcaatatctgattcaatattataatcaaaagttgatctaggtgttgatcttgatcttgatctaaatttaagtttagatttaaatttagatattttaatatctttttcatttcttatccgtttatcaatctctaatttcatcctttgactttcctttaatgaatttttcaattgataatgtgaacttttaatataaatatttaataatttggaatatttacccataaattgtccagttaaaagataacttacaaatgcaatataattaatattaccttctaacataagtaaatggaaatcatcaccatataaatattcaattgatgaataatcattaagtataacaattgatctagtttggaaaaatctaggtacatcaaatttatttttagaattaacattaagaaatgtaactattaaactatcatcaatattgaaagttttaaaattacaataattttgaattaatgataaatcatttaatttaaaacaattaacaaaataattataattacaattggagaatctccaaagaaatttaggattttgtaaatataatgaaatttcaatcgattcaggttcaaaattacttggtgatatattaaagaataatttatctattttacttatccttttaagatcttcaatacaatatctaattaatgaccattgataaatcataaatatttgtctctgtaaaataattgatgcaattctatttaaatctttacaatcaaaattcttatattttgatctacatgcttcaataaattgtccagtaccataaattgtattagttgtaggtgcaattattaattctcttacattattggtcatattaacaaccccaggtgtgaataacatcgtatattggtttgctatagctttataaaacaagtaaaagtaaggtggaagcaaaaaaaaagggaaaaagtatattaaacagggcacttttcatatatttaataatctaacatttcaattactgggaaatctttaatagttggaacaggtatttcatcaacataataaataataccattatcatcaatcctttcacgatctcttttatcaactgtatatatttcaacaacattatcctttaataattgtaaaatattaataaaatttgattgaattatatatgccttttcaatcatatttcttttaatcattgcatttaataatttaattgtatcaggttttgtaacttctaatctatcaattaatctaccaattgaactaattaaatattcttcttcatatatagtacctttcttaccacgagcttttttacgttcctctcttctcttattctttgctgtacgtctagatgcacctgttttagcagtacctgatgttttacctgtatatcttgtgaaaaaagattccttagttgatgcaatcgatggagcaattgaaacattatctggtgtattttcttcatttatttctccatagaatgaatatggatcatttaatttcttttcacgtaattcttttaatctcttcatttgtgaaattatttgattattacaatctgctaataattcagcaattgtagcaaatccttcattaattgatggatcaataattgtttcaattaattttaattgattttcttcataacataattgaattgcagttgaatattcatattctttaccatataattctaatgcatttgataaattatttaaatatttataactaatatatgcagctgatttataatcatgaataattgttaaactatcaattaatttattacatgtatcttctaatttatccttaaattcattcattaatgaaattgtaattgcctctctccaatttttacctaaaatataattttccaaagcattattaaaatcttttaatttttcataaataattgcactttcactatatttttgattagaatgtaaatatgatgcaaaaaattttaaaattaaattataattaatttcatcatatttatataattttaatgcatgtttatataattcattatcaataatataatcaattatttcatcttgaatattagaacattctttaataggtattttaattaatgattctaatgcttttgaataatttttcaaataattatcaattgaaaatttcattcttaattcactttcttcatataatttttgtaaaaatggtaaatattcctttggatctttttgactttgttgtgcaattattaatgctaatggaatattataaatacttaatgcaatatcatataatttattaatatctaaaaggaaacataaatgttgaacagatttttcaatttctaaatcatttgtaaatgttgaaattaattctaatgcttctttagctcttggaggtttttgtgatgcatatgctgtaataattgattgtaaatatttttccttatattcaacattattaattaaaatttcaagaattgaatcacaaatttttctaactttttccttacctttctcaaattgaataagttttaattttttaacatcagtaataagttcttcaatatggggattttcaatatcagatttttcagtttctttatatttagtttgacaaacatcttcctccaataaacaagaaataaataaatctaaaaattcaactttacctaattgattaataaaatgttttaaattattgaaaaataattcaggattataatcatgtaaaatatctaatgaaattctatgagttctacaaatcataaaagcattataataatttaatttattaatatttaaacgtatatcatttaaaactaaaattcttggataaattgtctctaaattacctcttggagcttgtaaaataactaatgattttgatggacatgaattaactaatattgaacctctttcaattgatctaattctttcatcatgattaatatcatttgaagttatgacaaattcttcatcattaatgaaaaattcattatttaaattaataaattttaattcatgttgtgcagttgtaaataaaagatatgaatcagttgttaacattgatgtaacaccatttgatataagtttattatttgaatataatttacctgaaatagttaaaccaattggtaaaatagtggtaaattcttcttcagtattaatattaacaactttaaaatcataacaaatttcagggaattgtccaataattgaattatcaataatatttaaaatttgtccattaatatattcaacaaataataaatcattcatataagaaattttaataactttataatttaattcaattatatcattaaatgaaacatctaaaaggtttaattttaataatttagaattattttcttcatcaaataatatataaataaattcatcaacaattaaaatttgtctaacaaagtaatctggatcaatatcaaaattatttaattcattaaaattccatgtatcgtcaatactattttcaaacaatgtaactttattatttgttaaaattgccaaaaatttattatttgaagaaattgaattactaataatattatcattaacaaagatatctctataagaaattggtggaggtacattagccttagcaaatggtgttaacatacaattattaccatcaataactaaactaacacctttatcattatttaatgaagttgaaccaattgtattaatatatgaaaaatcaataatttttaaattattatcataagtaccaataattaatttaaaaggtttttcaggatgaaattttgtaaatttaattttagaatttaatttaatttcttgttttaaataccaatgataatttttaacataccataattgaattgaattttccaattgtaataataaaatttcagaatttgatgaccaatcaatatttaatatattatcagttaagggatttaatcttgaattaaattcaccatgtcttaaaccatttttttcaaagaaaataatatccaaaacataatcattaatttcaggatctgaatcgaattttctttgagttgaaacaataattgaaccttgaggtttccaagctaatgaatgttcatgaccatcaattggttcactaattgaaattaattgaccatctcttgaataaactctaattgatcttctctttaaattatcaatttcttcaataattgaaattgaaaaaaattgacaatcacctctccaagaaattgaaacattttttaaatcaaattcagttaatttacccatttgtttaaatgaaattgttggatcacataaaattgcattttcactatcaatatttaaacctgcatttttcaaaatttctctatctctctctaattgttttttacctttacctttaaattgtgtctcttctttaccccaacctatggaaacttgattattaaaagatttaatatcatttgaatcaattgaagtttctaatattaaatctaaatttcttgaaaataataataatttataatcattagtaattaaagttaaaatttcttcatcataagaccattttgcacttaaaatacctgcatcaattgtaccaataatttcaataattgaattattttcatcaattccatcataagttgaagaaattatatcaccatttgataatataataataaattgattaatatcctctaaatgagcaattgatttaataattgaatttgaatcattaatttcaactattgataaaatttttaaattaccaaatttatctaattgttgaaattcaattaaattattatttgataaaataattgttaaagaatctgaaattaaatcaaaacaagtatcaataagatttaaatcaggagcagatataccatcagttatgatggtattttgattaagaatttgtaaattcttcattgcctaagaagagagggtcttattctatatatcaaattttttttccattcatgttagtatttcagtaataattttttttcctttagttttagttttaattttaattttcatttacgtaatactattataaattaactgataattacctaatatactacaatatactcaccattacgagataccaaatgcaatactgaaaagaaacaaagaagaagaagaaccaattgaaaagaacgccaaaaagagggcaaaccaatctatttaaatagtttttgtaaaataaagtggatgaccctaaatgagccttcaaaatgggtttaaatctaattgagaaaaatttactgagccttcactatttattattacgtaacgtttattatattaaatataaacactgtaaatatactatagacaagtaagagaataactatattattaatttgaatcagctcttgattgaacaatatcccaatcaattgaagctaaaacatttttaatatattcttgtttaccataaactccataatctcttaaataatatgaaggatttgaaggaattgcaaataatggatgtgaattaaatttaaaattattaactttttgagcttccttaattgttggaattgtatgtttatctgatctaatagaattattatcttgattaattgatttatttttcctattattaaattcttcacctgtttgaattctatttgataataaatcatatggtgaaccattattataagtattaacaattgttaattttttaaaattttcataagttttactatttgcaacataattatatgtaacccaagtattaccattacccttaattgataaaattgaatcatttaataaagttaaaaattcttcaactgaattaaatgatgatttaattaatgataaaaattttggtgatgttggtatattattattaagattatttattgaaattttatttgtctctaataatgcattagcattaggttttctcaactcaccacttcttgattttaaaattgatgtaaaataataataattataaatatttgaagataaatcgaaaatatatgaattattatcataatttattgaacatttctctaataaatttttatattgaccaataattggattatttgatgcatccttatgttgagatttaaaggaatcaatataatttttataataagaatcagataatgcctcttttaaagattctaaattcattgattgtccattatgtaaatcttttaaagtagaatctgagaataaaccctttaaaccagtattatttgcaattgaattattaattaattcaactgttggtaatttaatattatcaataattatactatcattgttggtagtattaatattattattaatattaagttcctgtctagtaaatgataaattagagaaacatctataaccaattctactcttccccaatgttattctaatcattcttgtcctgtctataatacaatatagtataccttccaatagtaaataatttcagtgaaataatttttctcgtcgcagtacgtaaagtctattaatactcttttcgaaggcaaagttacccggtttatagggggtatattatacctctattatcactgtatctctgtactacccacatctacaatatcccaatacacacaacttcactatactataccctactagacactactacactctactagactctaccaatataaaacaaaaaaagaaagaaaagaaaagaaagtaaaaatcaaatagtaaaaccttccatccaatttttatattattatcaagcatcaccaaattaccttaaacacttgtttattaatctttattttattttattttatttatactttatcaataggtaacttaatatctacttaaactacaaaggagattacttctcatctattatatacatacatacatatattatattcattatctatctatctatcgtatacccattcatcccataagtcatatataatatactatactattactatactatacttcaataaataaataaataaataaaacaacataattacacaacataatgacagatattcaagaagcagatgttgattctattattgatagattattagatgttagaggttcaagacctggtaaacaagttcaattacaagaaaatgaaattaaatatttatgtacaaaggcaagagaaattttcattcaacaaccaattttattagaattagaggcaccaattaaaatttgtggtgatattcatggtcaatattatgatttattaagattatttgaatatggtgctttcccacctgaagcaaattaccttttcttaggtgattatgttgatagaggtaaacaatcattagaaacaatttgccttttattagcttataaaattaaatatcctgaaaattttttcattttaagaggtaatcatgaatgtgcttcaattaatagaatttatgggttctatgatgaatgtaagagacgttataatattaaattatggaaaacttttacagattgttttaattgtttaccaattgctgcaattattgatgaaaaaatttttacaatgcatggaggtttatcaccagatttaaatacaatggaacaaattcgtagaattatgagaccaactgatatacctgatgttggtactattatgtgatttattatggtcagatcctgataaagatataatgggttggtcagaaaatgatagaggtgtatcatttactttcggacctgatgttgtatcaagatttttacaaaaacatgatatggacttaatttgtagagctcatcaagttgttgaagatggttatgaatttttcagtaaaaggcaattagttacaattttcagtgctccaaattattgtggtgaatttgataatgcaggtgcaatgatgagtgttgatgaaagtttattatgttcattccaaattttaaaacctgctgaaaagaaaaaatttcaatcaaattcacaatcaaatgttaaaaagagaggtaatagagtttactaattaataagtctttaaaatttattatacatattattatattatattatatattagtctttttttcttctttataatttttttattaattaattttataattttaatccttatccacttatcctataatggaccaagataatcttccttaatactaccaattgcagaaattgaatcaacatcatgtcttgtaccaattattttaattcgtactttaccaccaacatgaacaacttgtccatcactatcaccaatataagcaggtggtgaatgagctggtgcatatctcatatcacttggaattaaatgccttgaaatgaaaattgataatggtccaacatctgcgaaaaatcccattgaattaacacttgaaacaattccatcaacaacttcacccttaaatggtctccaaactaatgcagtatatttaacatcaaattttgcattaccactattattcataactaatcctttacctgaatcaatttgactccaattaagtacacaaataacatatccaaatctacctgtacatgtaccttcaacatcatgtaataattgttgacgtaatcgtgcaggcatatcccctcccaaggcggaaggtggtaaagtaactgctaatgataactgtttcacaaagaacatccccactgtcctacaagcaaccccagtatcaacctctacatcgataacctatatacttccttattaaatgataaagttgaaaaattcttattataataacccaaatcgtcgcgtctctcttctctttaaaattcccaattttcaaccttttttcaattttgcaactttttccgacatgaaatattaatataccacttttaagaccttccttttagcaaatgtcaaatcacataggatcagcaggacttgcattagtacgtacatggcatcatgtggatatagccgcagatcaacgtactttgggtagattggcaactcaaatcgcattagtattgataggtaaacataaaccaattactcacccaactgaagatgcaggtgattatgtagttatttcaaatgctcaatatttaaaaattacaggtagaaaattaactgataaaacttattggtctcatacaactcgtcccggttcaggtatggcaactccaatgaataaaattattaatgattttggtcattctgaaattattaaaagagctgttagtagaatgttaccaaaggataaacatagaaagaatagacttgatagattgaaaattttcgatggttcaaatcacccttataaacaaaatataattgcttgggctgatgaaagtgataaagttgcaaaggcaattgaagaaaataaaattagagaatcaaaaattaatgaatttaataatttattaaattcaaaagtcttatagtaaatgtttcttcttttataacttttttatataatataatacatgtaaatacactcttcattacccccttctctaacgaacagtataactactcttctcagtatacaatcttggtgtaatattcattgccattaattcttgaaataataatttagctgcatatggaatatgaatttgataaatattagtcttattcttacaactcttacattcaaattgtcccttctttaaatttgcaataacactcattaatccacaaattccacaaacatgaactctaaatgcatcagaactatccattaatctctcctttaaaaatccagctgcaccatgtgcaatcatacaatctctctccatttcaccaaatcttaaaccaccatctcttgctctaccttccataggttgtctagttaaattttgatatggtcctctagctcttgcatgaattttatcatcaaccatatgtcttaatctttgataatatgttggtccaaagaaaacttgtgccattaattttttacctgtatgtccattatacataacttcaaatccacgactttgatatccattctctcttaataatttagaaactgcatcaactgttaaatctgtaaatggtgttgcatcaccttcataacctcttaatgatgcaactttacttaataaacattcaattaaatgtgcaactgtcatacgtgatggaattgcatgtggattaataattaaatcaggtataataccttcactagtaaatggcatatcctcatttctatatgtaataccaattgtacccttttgtccatgtcttgatgcaaatttatcaccaatttgtggaatttttcgttgttcctcattctaactttaacaaatcttaaaccttcactattagttgttaataaaacttgatcaacaataccactctctgtaactcttaatggtgttgatgcatctctctttgtatgatatttagttctttgacctaattcctctgtatctaatggaattggaacagttttaccaataataatatcatcacctgaaactctaataccaggtgaaattaatccatcatcatctaatttttcatatgtacctgctttaaatcctaatgtattacttctcattggtttttcaaattcttcaacaactgaaataccatttcttctctcttgatccatataacttctaaaaaataatgatctaaataaacctctatcaattgatgattgattcataatcattgaatcttcttgattataacctgaataacatgcaattgcaacaattgcattttgaccagcaggtaattctcggaattttaaaaattccattgattgtgttttagctaatggcttttgtggataatataaaatatttgccattgtatccattctaacattataatttgttaagaaaactcccatagcttgtttacccatggcagattgatatgtatttctaggtgattgattatgatcagggaatggaataattgatgctgcaacacctaaaatcattgatggatgaatttcacaatgtgtaaaagaatgtgaattaatatgatttttaactctttgtgcaaaattattatcatttaattcattatcatcatcttccattttaatatcacttgtattattatctaaatcttcacttgacattgcaattaaaacagtttcttcttcctctgcatctaaatattcaacaataccttcacttaataatgaatcccatccataaattctactaacagtattcattattaaattaccttcttcatcatattgttcattatttccatcttcatcatcatctccaccaaaattatcttgtggtatctcttcaatttctctatctaatatttttctacaatgttcctttgttaattttaatccacctttaaattgtgaatcaatatcatcttcaacaataaataatggtctataaactctacctgcatcagtgaaaattttaaattcacgttccctaatatttctaattaatgaaacttcacttgatattgtaccacttcttcttaattgtttcattgtatcaactaacataccaggatctctatgagtaccaacccaattaccattaaggaaaacttttgtacttaatttatgttcttgaggatcataatcagtaattggttctaaaccccattcctctaataaataagtaattggttcacttgcagtaccaacagatatacatgacattaatgataaatttttaactaaaccacaagcttgaccttcaggagtttcagcaggacaaactaaaccccaatgagtattatgtaattgtcttggtttagctaatttaccatctctaccaattggtgtattagttcttcttaaatgtgataaagttgaagaataagtatatctatttaaaacttgtgaaacaccagcttttgaactcattgcctttttctgttcaccccaattaccagttgctaaagaatattttaaacctgaagtaattgttgttgatttaacagctgaaacaatattaaaatcttcaccatgttcaatacatctttgcatatatcttgtaatatcacgtgaaagtttcctaaataaagttctaaataaattagctaataaaggacctgctaaatctaatcttttcttaccaaaatgatctctatcatcttgttcctttctctctaatgcacataataataatctattaataatataacctaaaaagtaagctttatcagtttcatgaccaccatcttgtgaaatatgaggtaaaaattctctttgtaaaatatcttttgcaaattgaattcttctctctcttttaataccaactgcattacctcttctaccaatataatctaatgcaacttcttgtgattgaattaagaaaccttcttcaatacaaggttttaacatttctaacatttgccaatcattatcatcataacaaatatgttgtaaaatatcaccatcttcaataacacctaaagctctgaaaacaattataattggtatatcagttttaatataaggtaaagtaattttaattgatctaccaacaccaccagctttaaaacttgatgcaccaccacttgataatttaacttgaattgaagaaattaatcttgaacctttctctaatgcagatctaatttctgcaacatgagatattggtgaaacaccagattttttgaaaacttgaacaatattagcagatgatctctcttgagcaattaaaactttttcacttccattaataataaaataaccacccatatcaaatggacattctctaatttgatataattcttcttcacttaaaccatataaggtacaaaatttagatttaagcataattggaactttaccaatgaaaattgtttgagtttcagcacctgatttatgaattttaatattatgtttttcatcaattatatcatcatcatcatcagtaagatcatttggaattggtattaattcatcaatttgattagttttatatttataaatatcaccttctttataccaaataatttgatttgaagatttttgttgattattttcatcatcaatactttctttaaccatttttttcatttcaacataaagtggtgcagcataagttaaatttcttaatcttgcctcttgaggtaataaagttgaagttgtaccatcagcttcagtttgtgaaggttttgaaaggaaaatatcaccaaatgtaatttcataccttctattaacatcatcattttcagttatatgttgagcaggttgatctaaaattaattttttatcctctaaaactaattgttgaattgaagtttcaataaattcttcaaatgaatctaattgttggactaactaaacctcttgtttcaaaaaatgaagtaataactgtccaacaatcttcagttgtaatttgattatcattagctagagaatattctccatgatcatcatgattcatatccattcttgatacagttgattgaatgtccaaagaaaccaccatataaacacttaatcaatgctcagcaaatttcactttttgccactttaattgaaaacaagaaaaaaaattccaacaaagttaccctctccgattacgtaacaacttttttcttcccttttaaataatttttccaatcgtccatttcactacatgaatattaaggaaagaggtacagtgtagaataggataggacaggataggacatcttcacaggacaaaccatgcttaatattatatcaccattaaggacggttaagaattctttcaaccttatatcccatcgtacaattataatgggatatcgtaaaccattttctccaaaaccaaaagtaaaggaaaatcgtcaagatcgtgcaactagatccaagagaattattcaattaattagagaatcattggagaatgatgaaccaaattttattccaggtaaaagaccaatttatttaccatttgcaacaattaaattattaagaccaaatgcaaaacatacaccttatcaagcaaaatttattgtaccaaaatcttttaataaattagatttaagagattatctttatcatatttatggtttaagaacattaaatattacatctgctcttatgcctggaaaatttattagaagtatgcctgctccttatggttcaagatatagagataaacaaattaaaaaaatgacagttgatttaattgatccatttgtttggcctgctgaaaatgaaatgtttaaacaagaaaaggaattaacaagggaattaaataattatagagaagagaaggcaaatgcaattaattctgatagagaaaagccaagtaaagcatttggtggtattattgataaaaatccaagaccaatgaatttcgtttcaaaaattgttagaagacaaatgaaaaatttaaaatcaaaggatattgaacttcaaaagaaattagaaactgataaattcattacttcttatattaatttataatatgtatgtatgtaaatttttataattttaaaactcatgtaaataataaataaaagaacttcccaaaggtatacatattaaaaaagcaaatgaatagaatataatcacctataaccacatcacatcatcaatcctttgatgatgatgatctactaaaccaactacttttacgattaacaacattttgtgcagtatttgaagcacctgatgcaactcttttaacactttctaataatccactattatccacctcatgtaatgtactattattactttcactcctcgtctttttaatcttactattaagatcactattactatcattcagatcacctttactaacaatatcaaaatcatcaaaacttctagttggtgatgtattattcgtactatttgtatttgtatttgtatttacatttgtatgtgttaatatttcaaattcagtttcaaatattgtatatccaaatggtgcaaataatgcagatattaatgatttattcgtagtagtggtaggatttggtaattccctattattcatactaacatctttcattgaataaaccaacccccataattgtgatacattattcattgtatgtgaaattcctccattattatcattttcattattttgtacaaatccttgaaataatttcctataatatttcatatcaattcctaaacttaacaaaatttgattactaacaggtattttatcaattaaattacaaattatcaaacccataattcctaaatcatttaataattttaatttaaaattatttaatttttccatattattatcaaaataataatgataaataattgaagcaccagttgatttactaatatttccattatatttatttttaacgggtataattgcaacacctaaccaaaattgtatataaattattaaaaatgatgaaaatggtaaaatattaattaaaaatgatattggtggtaattgaataatataaaaccatattgataataatatccaatatgacattaattcttgaatttccattgaaattgatttattaattgaaattgtattagttaatgatgcaattggtgtatcatgtaaattttttaaatttgttaataattttatagtattaataaatggccataataatgacacagttgaagcaattgatgtaattataccaaacatggtgtactaaataaaagaagaaagaaagaaagaaagaacaatagataagaaaatataaaatacaagtaactacatcatgtaatcaactaaatcatttaataaaatttctgtctccgaaggacttgcaacccaagcagttgcagcagctgttctacttgcataatcattattacctaaacttgcaaattgatcaccaacatgtaatgtattagattcattaataattatttcacctaattctttattaacaaaattttgtaaaatacgtactccaagtgatttatcaccaatatcaatccaaacatctctaccaccattaaatgcacaccaattgatattacaatcttgaaatttctccctaagggatttatcaattcttaaaacaatttcttcaagtatttcacgttcaagtttaattccttccattggtataataccaactgcacgttctttaacaataattgaaatcttatcattaatatttaataattctgtaaattcttttaataatccataaccaaatgaaagtatcctttcaatctctttatcatcccataatttcatttcatctaataaccaatcttttgaactttccatttgtaatccactaatttcattattatatcttaataaataattagattcaccaccaataactaataaattttccttctgtttcaatgacaattcttcactctccttaataccatcaattaatccaaataatctctcataatacttattagattgattatacccagcagcggttacaattccgattacaactcccatttttaataattctaataaatattttaaaattggtgaatttccttctaaattattaccatcttcatataatgtaatatcaccatcaaatgtaattaattttaaattatcctttaatgcaattaattgtgcagtattcagtatttgtctaatatcattaaaacttggtgcaacaaatttacgtttacttatacatcttctattatcttgaattttgaaagcatccactaatggtaaaactgtaaagaatttaccaatacttggtactaatttacttaatttacttagttgtggattattaatatgatcaattattaacatttcaatatcttgcagaatttcacaatatctattaactgtattattattattattattattaattgattcaattgtattaagtacaaatggtgttgaaactaatgctttaatccatgtaataaattcatcccttctatgttcctttaaatgataatcaactctatatcttgatgacattgttgtatataccccctatactcttatatacctaatagtaataaacctatataatggaaaacctcacgcgtaataattacaatggacacgatcttaaactctttaatacaacttcttcttcttcttctttaccaactccagctacaatgatatcaataagagtagatgctactatgctttcacagaatgtttctaaaactattagaattataggacaattaaaatctattaatgaaaatgataattcaggtattttagatagtaatggtacagttaatttccaaattgataataattttaatgaattattaattaataattattatgaatttattgcaattgttaaacctgatttaagtattaaagtattacaaacttttaattttggtgataatttaaatattaatgcagttaataaaatggttgaagtagttcataaaatacctgaattatattacgagtaagtatggttaagtatttgatataatatataaagctataaatgatataatggtataagtaataaatttagaagaccttaatcaatccatcttcttttctttaattttctctttgaatctgctaaatttttatcaattgttgcactaactaatcttttacttgcaggataccaactaacttcacttggaaatggtgcaggagttgcaaaattaactaatgaactcattgtatatgaccaaccaggtgtaattgttgataaaacatttggttcctttaaaaatgttgaataatatgtaacacttgaagttgggaatcttcttgaccatgaactaacagttatttgagaatttggttgcatttgcattggtgcataccttgttttacctgtttgttcagtataaggaattgaaaatgatgctgaagtatcttgtgctgcttcatcattagtttcaccataaggtgaagcacctgaacctgttgcttccattgtacctgtcataccacttaataaaactctattcagtatatctaaccatatcaccaccacttttcaataatgtataaacttgaacataatataaaccatcagctcctaaatctgcatcgaaaattggtgtataagcattgatttttaaatcacttgcaggaattgttgcaattttttgtaatccataaattgcatcatttgcacctgtacaaaggacaaatgtataagatttaatattatcatcagttggtgtttgaccatcatcttgccaagaaattggaattgcaatttgtccatcaacagcttcaaatgttgcacctgctaaaggtcttgtaagtactatttgggataatactgggttaattatcagtgcaaggaataatgtaacgagtgagagaggtgataacattgtgcagttgatgaagaagtagtaagagaaaagaaaagaaaagtaagaaaagaaaaagaaatcatgaaattctgttttgctaaaaataaacaaaatcctcaaaaggtccttcttcttctcttctataagcctacttcttattctgtaaagatgaaccgtataactactataacatctcttaatcgtcactatacccaatcattacacctcaattccaccacaggatttattctttcaagtatccaatctcgtagcttcattacaagtaatttacaccttaataacaataatgcatatttcattatcaaatggtaatgataatagtagatacattgaaaatttggcaaatgggttcatttcaattatcattacgtagagtaagttataaaaatattgtagatattgtagttaatccctgacaatttacctagatggtcatgtaataattataaaaggatattatcattcatggataagtttagtaatgatgatgatgttgataaacttgtattattatcatattcagaggatatttcaccaaatgtaagacttgtagaggaaatagagaaaaatataaattcatttattaaaattgctattaattcatttaattatctatttaatacgaataataaagatactataccaaaattaaaacaatttaattgtaaaccatttatcaaatggaataaaagtaatcatcaaaatatattaaaacatttcattaaatactctagtttcctttcagaagatgatctaatattacttaatgatccatttatttggtgtaagataggtattactgaaacaattaaattatcaacaattgattaccttaagtgtaattctaacaggttatacatttgaaaatggtatgatattacaatcaactaaaaatcgtttaaatttatataatccaaataatgtatgtaataattaactagactttcaattcattaataaattcaccaactttatcacctttacgcattaatgattcaccaataagaaatccgaaaacattttcacttttataagatttaatatcctcagttgatgtaataccacttaatgcaagtataacaatatctttattattactaccaatttcattaacaattttacttgttgttgataaatcaacattaaaattagttaaatttctattattaacaccaataattttagaaccaattttaattgcaatatttaattcatcaatattattaacttcaattaatggttccatctgtaaactacgtgaatattccaaaagttcctctaattcattaattttaagcattttaacaataagtaaaatactatcagcaccatttaatcttgattctaatacttgatatttattaaaaataaattctttacgtaaaatacatggtctgttaacaccctctatgacatttcttgcaatttttaaatcattaattgaacctttaaaccaatttggttcagtagagatagaaattcctgcaacaccagaattagcatatcttaatgcttgaattgctgcattagcattaatatcaatattaccctttgatggtgaagctcttttaatttcactaattatagcaatttccttattagatgttaaattaattaatttttcatgaaaattaacaactggaggataaagacctaatttataatattcctctaaatcatcaaatgataaacccggggaggacatagtagtttcaacatctttacgacgttgactgtagattttttctaaaatattagaagtagtactaatattactagatgcactagataaatctagtgcattatcatttttccaataaccaccttcaattgataaaatatttctaatcattaaatgaccttcctcagttaatatactctcaggatgaaattgaacaccttcaattgtataaattttatgcctaacacccataattatattattttcagttttagcagtaatttctaaatcatttggtaatgtccccaatgaaccagctaatgaatgatatcttgtaattgcaacaccttgagggacatttttaaacatacctttattatcatgattaataattgaagttttaccatgaacaatttcaccagcaaattcaacattaccaccgaaaacttcaaaaatacattgttgacccatacaaactccgaaaattggtaatttacccttaaaatgagaaataacatcacgagaaatacctgaatcagtctttggatgaccgggaccaggtgatataactataatatcaggatttaatgattcaatttcatcaattgtaatttgatcatttctaaagacacttactttagcaccttcttgacaaagatactcgtatagattccaagtaaaggaatcatagttatctatcataagcacatgtttagaagtcattgcagaagaagaagtgtgtactagacattatgactcagatatattaatcaatagtgaaaaattcatgataataggttaaaattacccggattatgtcattatagaatatcttttccaaatttttcattcttttcactaaggttaaagacctattacatttcttcctctcttaggacaaaaaatgatctatttaaagaccttacttaaagttatagacaattcaggagcagagatagttgaatgtatcaaagtacttaggaaatcaccaatgaattgtgcacatgtgggggataaaatagttgttgttgttcaagaagctaaaccattatcatcaacaattacgggtacaagtgcaagtaatagagttaaaaggggtgatatttgtagagctgtagtagttagaactaaatatccaattcaaagagatgatggtacagttattagatttgatgataatgcatgtgttttaattaatcaaaaggatgaaccaattggaacaagagttggatcagttgttgctagagaattaagaaagaaaaattttaataaaatcatatcacttgcaccaagagttgtataatgtctaaagatagatagatgtatccatgtaaggtgtatatcaactgtatatagtaatgtctcttagtaaaagcaccgacgcatcgtccagtacgtcctccccatttttaatttcctcactgttgaaattattcagtaaatttttcattggagtattactacaagacactcttcttaggacaagacaatgccatatcagaaaatacctaaagcagttacgtccattatacctcaagggactctcctcttctcgttatttgaaacaaggtcaacatttagatttaatctctaattacacaaattcatcatatcatttcaataatgttagtaaattggaaattatattcaaacaacattcatcttatggtcatttaggtatgaggaaattttggaaaaataatttgaaaactatttattatcataatccatcattaataattgatgttaaaagaatcgattgtcaagagagggaacaacaattaaattgtccatgtattattaaaacaatcacaaaagaaggtaaagagattcatcatcaatggtaaggataaacatagtgatgatataatgaaagagttggtggaaaagacagcagcagttgcagtgccaagtgaagatatcatcagttattcatcactgattgaagaaaggagatagtatatagtatgtagacttgtatatattacgtaataatcacgtgaccataataataattattaattatacgatcgtataattcattgcatgattttaccactgggtgaaaaattattatttactgattgcatctacagctctttaaataccgtgtcgtattcttcatttatttctatcttagttctttctcttctttcattagagcaaatgtctgtaattaaatctcttatagatgatactgttagtatctccattacctctattcacatttcatctctttatcactcctatctcaattatcaatcttaatctcatttccattcatttattcattattatggcaattcatttattctttaagaaaagatagagttccaatggttcactattacatcccatgggtaggttctgctgttacttatggtatgcaaccttatgattttttcgaaaattgtcgttctaaatatggtgatgttttctcattcctccttttaggtaaagtaatgactgtttatttaggtccaaaaggtcatgaatttgtcttaaatgctaaattaagtgatgtttccgctgaagaagcttatactcatttaactacccctgttttcggtaaaggtgttatctatgattgtccaaattggaaattaatggaacaaaaaaaattcgcaaaagttgctttaacaaaggaaagttttattaaatatgttcctctaattaaagaagaaatgttaaaatattttaaatctacatttaaaggtaatagtggtgaaattgatgttttaactgctcaaagtgaaatgactctcttcactgcttctcgttctcttttcggtgatgaattaagatctaaattagatacctcatatgctcaaatgtattctgatttagataaaggtttcactcctcttaattttgtcttctcctacttaccattacctaattattttaaaagagatgcagctcataataaaatcgctcatacttacctagatttaattacaaagagaagacaatcaggtaaaattgaatgataaagatttagttgatgcattgttgaaaaattctaaatataaagatggtactagaatgactgatagagaaattgctaatttaatgattggtgttttaatgggtggtcaacatacttcatctgctacttcttcttggtttttattacatttaggtgaaaaacctgaattacaagaggaattatataatgaaattaaatcagtactcggtgatagaaatgatttaacttatgatgatttacaaaaattagatttagttaattcaacaattaaagaaactttaagattacatatgccattacattcaatttttagaaaagttatgaataatttacctgttccaaatactccttacattgttccaaagggtcattacgttttaattgctccaggttatactatgcttagtgaacaatatttcccaaatgctaatgaatatcaacctcatagatgggataatattaaatcaattgatggtggtatttcattaccttcaattgaatcaaatggtaaatcatcaaatgaaacaattgattatggttttggtaaaatttcaaaaggtgtctcttctccttatttaccattcggtggtggtagacatagatgtatcggtgaacctttcgcttatactcaattaggtactttattagttacctatatccttaattttaaatggtcaagtaaatgtcctccagttgattatacttcaatggttacattacctgaacaacctgcaactattaaatgggaaagaagagaaaaaatttaagtcaaggtgttctttactataattatacgaagttatataactatatctatactatcttattattaatactacttttcatgatgttcttctatcattaacaacacttaactctttctccacttttaaatctctattcttaatttcttcatctattaaaacttgtttgatttgctttgtccatttatcaacaattttactcgcaattgtacaacattctaaaattttacccttgttcaatatttaatcctccacttttactaatttgacaaacttctttgttagaatttaatgtaattgtcatactaccctgtgataataattcttcctcagatgttgcatcaactataattatctcattagaacttctactctcagattctatttccccctcatcattatcattatcaacttccattctatcattaacatcatcttcatcatcactatcctccttaatcttcctactaataacacctttttcacctttaatatttctttcaatactctctgttgaaaaaaattgaaatgtaacacttaatggtatatgtaaaacacttaatccaactttctccctttgattttcatcaaatataactaattcactaccttctccattaccaataatttcaatatcattcttcttaaaatttcaataatgcaataataacagctaaattacctgcatcaattaaattaccatcataattcaaaaatttaatatcagctctaattgaccaacatttttgtcctgcaattatacataatgattctaaatctaatgcatttgaccttctaactgccttttcaattaatctacttaacattatttcaatacttgtttgatcaacacctaatcccatcattgcaccacctcccataataacatctgtcccattatcttcactaccttcttcaactgatataacagttttaggtataatagctggtgcacttgttgaaaaatcattaccaccaccatttgaaaataatggtgaacacattggagtaatttcagtatttatagtgaaaataccttcaaattgtctatcttcgaaaggttttgtaattatagcagatattttacaactaacatatgtttcacctaatttaatttcaatattaccattatctttattaattattgaaattttcaaatctcttggttcagttaatggacgaagtgatggtcttaatggtggatttgatgaaaataatgaatgaagggttagaatgttaggtattggtaatgtattgtccgtgcttggcatgtttgatgtttataaaaagaaatacagactgaaaagattaaattttcatgttgaaatttttttttaccatgtacatgatttttaatgattatactttatattaagaacaatacattttttttaacttttttatacaattatacaactataaacattatttaccatgcaattttagcaaagaatcccttaggatatcttctaaccatcattttacgaatttcatcatatgagaaaacaattataccaaaacctaatgaaataaaataatattcaactggaacttgattattacccaatgctttttgaattgcaggaacataattaagtaagaaatgtaacacctaaattaaatggaattgcaatataaataaatctattatccttaagtaaattcaattgaaagaaacttaaatatcttgtacgcatacacattaaattgaagaaattcataatgactaaattaacaaaataaattgatgaactcatattaattatatcattaacaccatctaattcattatatttaccataacttaaattaaaatctgaaaatgtatatccatgacgttgtaaattaataaatgccaaaaggaaacttgtaaatgtgaaaaatgtaccaattgttaaatatgaatgtaaaaataatttccaatcaactaatttttcaccactaatacatcttggttttttccttcaaaagattcttttcacttggttcatatgcaagaaaaataactccaatacaatcagtaatacaacaaattataatcatattaaaacttgaaagcatttgtgggaaacctgctaaaatatttaataaaactggccataattctgcaaatgtaccagcaggtaataaataaccaactgtctttccttaaattatcgaaaactaatctaccatattttaatgcttcaataattgaattaaataactgcatcctctgaatcttcatcagtcattcattaaaattaaatcagatgcctcttttgcaatatctgatgcatcaattaatgaaataccaacatctgcttgctttaatgatggtgaatcattaataccatcacctgtcataccaataattgaaccatatttttgaaattgtttaataattaataatttatgttcaggtgttgttcttgtacaaactaattcagcatatcgaataacatttttccattccatttcagttaataaatcaatttcattacctgtcaaacttaatgcacgattaataactgttactttatcatttttacctttgcccatttttaaatattcaatttcatcattttcatcaatactataattatcttcattttcaacataatttaataaatcattatatttatcaattggctttgtaactatatgaacttgttttgcaatttctaaacctgttaattcaaaatctcctgtaatcattgcaactttaatacctgcacctcttaattgatcaataacattttcaattttctttcttggtggatcttgaataccaattaatccaattaaacataattcattattattaatttcatttttaattaaatcttttgtatctgcaccttgattttcaaaatttccacaattattaataatttgtgatgctaaaagtataactctcttaccttgtcttgaccattcatccttgattaattcaattttatttctaatttcattattaattaaaactgtcttatcattatcaattgtatatttacatttatttaataaaatatcaggagcacctttaacaactaataaaccagaatcattatttacattattaacaccaattaattggaaaccattatttaaaggttctaataatttagccatatatttatcagttgaattaaatgccatttcgaaaattgttttccaattattttcaaaaaatgatttatttgcaaatttatttgaaaaattgaaaattgctttatcagttgcattaccagttaaaacaccattatcagaaatcattgaatcattacataaacttgaaatagttaataaatgcattgttgaaggattattattattattattaatatcaatctcatcataattaatttcattaaaaccttttgaaatatttgtaactgtcatattattttttgtaattgtaccagttttatcaaaacataaaacactaattgatcctaatgattcaacagttgataaacttttacataaatattttattctttttcatttgatttgcagtaatcattaaacaagttgttaaagcaattggtaaaccttcaggtataaatgcaacagcaacagaaacaacatcaataattaaagtagcaacagaaatccattcaggatatgatttcctaatccaaactgcccaaagaattataactaaaataactaaaattaaaatgaaaattgtaataattgcaacaaatcttaaaatatccttttgaattggtgttaaacctgaatttggctttgaagttaattttgcaattgaaccgaaaactgtattatcaccagttgcaattacaatacctttacctgaacctgaaacaatgaaagtaccttgtaaaccaattctattactttctaaaaaatttgaatcttttgaatcattctttgaagatgctaataatggaactgcttcacctgttaaaattgctctatcaattgctaaatcacttgaacattggaaaattctaacatctgcaggtaatttattacctgcaattaaatttataatatcacctggaactaaatcttttgcattaacaattttcaattgaccatctctaataattgaaacttcagttggaattaaattattaattgatttcataacatttgaagatgaataatcttgaatcatattaaataatgcttgtaataggaaaactaataataaaataatacctaaagctaaatttgcaactgcaggatttggttcacctaaatggtttccaacaaatacaacataaaataccagcaactaataataaatccaccaaaaccaccaaagaaatacatgaaaattttcttaaataagttccttggaggtggtgattgaacattttcaccaaattttttaaaattaatttgataattaacatcatttaaacctgaatttaaatttgaattaaatttatcagcaatccaatttggatcttcacaatgataagatacattagcaaatttaacctttggatcagatacagtagtttttttataattatcaatttcatgagatgcagttttaaataatgaaggtaatgcgacagatggatcaacttttttagtagcagcagtaggagttggtactgtatgttcaatatttggtaatttaaaattaatatgttgattatgtggataatcaataaatgaattttgaatttctttactattttcaccaacagggagggaattaagggaactatcgtcaatatctttattatcaaatgacatgtttgttatatgaagagatgaaagagagggattagtatatactgaatttcagcataattgttgatatttaaatgaaattagcttaaagagagttacaaaatgtagttaaaatgtaattaagaagtaattcaaacatactctgtgccatggtacaaggtactagatcaagatcctaaagtctcaagtgttcaatactcgtgtacaaggtgctacgaagagaaacaaatggtagcaaaagtgaagaaaagtggtagtaatacaatgaggtaataaaaaaataaaaaataaatttttcatgtacatggtagcacttctcttgtgctttattaagagtcttacattacttatgtattctattgatgatggtatgatgatgtattggatattatacatattactatactacacactactctttctttttaaagaacatatctaatgcacccgatttaaccttaacaacgggtttactcgctttaactttacccttaacacttactttactcttctttgttctttgttcattcattgaattctcatgcatttgttcaagtgtctctgtaaatgtatcctgtgcctgttgttgtagtttgagatcattggtaaatgtctcaagtttattgaaattgtatctaccacttatctgatcaatataccatttatctacaaatgcactcataattgacacagcttgctttttccatatctcttcttttatatcattaggtatctctctattatacattgtatcaattcttaaatgtaatgatttataaatatccctaccattcatcaatttatctcccaacatgtcaattttattacacaaaaattcaatagatttattaattgatggtttaaaatactcttcttcatcaatgttggtcatttcacttattaatttcaaatatttattaaatttcatattatattcattaaccaatatatttataaatgattcaatatcacaaattgaatcaattaaatcttcataacttattaatcgtttactatcattatcattagatttaataaattgatttttaaaatatcctaataacagataaactggtgaaaataatgtcattataaataattcattatttgatccaataattaatgcttcatcaatattttcatctccatttttaataaacatacaattatatggtttaccatcaggtgtagtctgtaaattctttatattataattcttccaattaactttatccaaaaggtataattctactatttcttcacttccatttccactatcattcttagcaactataaattcttcaaagttgtttagaaatgggatgcaaacctttaattatactgtatttccacccattactattcaaatgatcctctggcactagaatacatctgtaatccctacaatccttctctataaactgtgattccatagtgtatattataagaaataccatatagaaactgactttaataaaattggaaaaaattcatttctcacagtaaaccaaagggcatattaaatccgtgtttataatatgttcatactggttctttatctaggaatatagtatagtatagtatacatagggtaaagtactaatggcaggagataatataggtaatggtgatgttaacccaacggctaattatacattacctgggattatgcaatatttacaatcacaatttactcaagttgaaagaaatagattacaaagtgaattagagaggagttcattaaaattgaaaataattgaattagagaatgaaaggaatgctttaatacgtaaaaatgaaaaacttcaattaattgttgatcaattaactgctggtagtagtttgaaaaagaatgatgatgatgataataaggaaaatataaatgttaatatggatcaattttataatattgataatgaacaatttaatgtaaagaaattaattcaagcaaagaaattcttaacttctgcaacaaatgaaatcttatatcttttgaaaactccaacaattgaattagattcaagtcaaagtttagctgttaaaaatttcattaatagagataataatgattcagtatttttcaattataacaataataacaataataacatcaatagtcctaatgatcctaccaatagtcctaacaataatggatttattaacgactcaaataataataatcataatgatgatactatcatcagtaataatatcaataatgaacttgctggtcctgatattgaaagacagttaaatgatattatttcaagtcaaaatattaatagtaatgtacctgaaagtgatgctgaaactattattgatgaacatgaagaaattataggtcctgtgaaacaaaagaaagatgaagaatctaacgatgaagaggaggatgacgatgatgatgatgatgatgattttgacgatgatgattttgatgatgacgatgatgatgatgacgaagatgaagatgatgacgatgacgaagagtttgatcaggatcttaatgttaacaacaaacaaaatcatcaaatcacaaattcagatatatccaaacatggtcaaaatgaaaaggaaaaattattaaaattattaaagaaatcaccaaggaaacccgttatccctcaacttccaaaattatcaattaaacttacatctgatgtatcagaaatggaaattaaaaagggtaaattatttgcatattatgataaattaaatgttgttaaaatttatgatgatttacttaataaaggtgaattaattaaagaaattgaactgccaaatgcaattgatattgttgatatagttacaaatgaaaattatgttttaattggtacttcaaatagtttaatagtttataatattcaattaagtgaagataaaagtaatggtaaagttgaaataaataatattaaaccaaagagtatagatttagatcaaaatagaattattatagttacagaaaataatattattatttatgaaattgaaacatctaccaataaaattaaacaattaattgaatgtacaacacattatgaaggtataattaaaaaaattaaatttattaaaaataatgaaaattttagtattgcattattatcatcaactgcattatatttatttgaattaaatgatgatggaatgacaattaaaccttttaaaaatatagtattagaaaattataatgaatggttacttacatcaaaaaatttaatattaaatttttcaaataaattattatcattatatgattttaaggaatgttcaggttttaaacaaataccatttgattctaattttacactggaatctataggtgcatgtgtcgatgaagatgatatgttttatgtttccaagtgtagtgataatagtcaagataaagataataaaagtatagataaacaaaaatgtgaaatattattatttaaagttgatgaatttgatggtattaaggaaattaccagtatttcatatattaatttcagtgatcgttattgtgttggtaagatcaacaatggatttgcattttttgtcattaaggatgggaatattgaagttcatactatataatataatataatataatataatataaaatagtgtataaattgcttaaaaaaagttttgatatagtaggtatattatatttttgctccccttttcacaatgttgtaatttgattgttattccttatggatagcaacacaatatgttagtaggagactatgtatttaagagattacttatatttttaatattaatgttctttgcattaatgttattatatacagattatttacaagaacttaatttttatcaaaataaactacaattagatgaatttaatgtaaattttaatacttttaaattacttcaagaatctagtctattaaatcaacaaaaattaaaattagataaaatatctaaatctaaccctattaacatcaaaccaattgtaaatataaaggaaaatgtaagtaataaagataaagaaattgaaaatgttgaaattttaacacttaatccaccatttcctgatattgatttaacaacaattggacctgtatttattgaaaatggattaattcatctttattgtgaatatagttttgattgtattagatgtacgattggtggtaaaatattacctgaaaagatttattttaagacaacttattttacaaatccaaattttgaaaatattttaattaattttggatttaaagaattaattgaatttttcaaaattaaggaaaagaatagtaataatgaaactgatactaaaagtttagaatgggttggagttcaaaatttaaaacctaatgtcgataacattgaattatttacaaattatataatgcttttcggagcaaatggtactaatatggatgttttcctaaaacaaaagattcaaaatgatgataatgatgataataataaagaaatttcaaatgaaaatctagttattaatcaatataaatattataattttataagaacacaagtatgtgtattatttgttttaatttatcttaaattaacaaattttacattatttggtataacattaatatttcaatttttgatgcatattccaatttatggatttagtatgtttaaatttgaacctaataataaaaatatcaaagatgatgaggaagaacaacaagttgatgatgatgatgatgatgataataataataaggaaaatataatcaattggaataatgaaacatcagtatcacagagcagttcgttaagattacgaaaaggatgtattaaagagattaaaagttctgttagtaaggaagataatgtatcacccttatctaacagtaacacgatgacagtcaattcacccatttcaccaataaaagatcaagatttagagactggaaatgggaatggaccacttcagaaaacaaacagtacattaataaacaaggaaagtggtatcagtataggaatgagtacaaatgcaagtgttactactagttcaaatagtagcaaaattataattcaaacatcattagatgaatcagttgataaatattgtttattctatttactgatttgtttattctttttatttcatttaattgtttatgaaattataaatataatactctatagccttatcagtggagtatttgaaaaaattgggaaaagtaatatggaacattttgaaattaagaattcatcaaataaatttaaattcccaactatttcaatgaataatagtaataataataataatgggaaatatacaattaacagaagtatattgtttgaaataatacttaatatctttggatggttgtttaatgtctcattagcagtgatatttcatagtgtttacacattttgtatctacagatacacagtttctgtctactgattaatgaaatgaagtgaaatgaaaaaaaaaatgtcggctcgtgagatttttttcatattatatcttctttgaatccattaacttctttttgccatcaagtgtataatcattgtataggagtataaccagttcatccaaatgcaagtaacagagagagaaatacagagggagaatattaagtaaattatttggtacaattaaaagaacaatacctaatagaccaggagttattaataaaatttgtccatgttttatatttgatgtatgtccatatgaattattgaaaaatacaagggaatcaatgggtgaatgtcctaaattacatatacgtaaaccaccaaatgatgaattaagggaagaattgtaagaaagagttaaagaaattaatagattcatgtgatgaaagaatttattctaatctcattagaaatcaattgattaataataaagatgataacgaaattactactgatgaagatgatgaagatgatgaaatggaatgataaaaggaggttttttgaataaagtactcgaataaatgtattgataatggtaataaaagagatattgaattaattgtaccatctaatgtcattatttgtgaaatttgtggagcttcaatgttaagaattgatacagatcgtagacttattgatcattttggtggtaaattacatagagcttatgcagatatgaggaatatgctaaaagagtagcttgtatctgacttacagatatcacgtgatcagaataatttgcaaaattcaaattttttcactttggtcgcacaaattaaatttttggggatttttcaatttcaataccgttgaattaattggttgtcatttaagttatgttcattagactttccttcattagacaacaggatggctgtaatgtttagtagacttgcactcaataattggaaatcaactattccttttaaaagtcataatgtcattaaagttaatacattacgtagtttctcaaataataaaattttaaaaacttatgaagaagaaaaaattgttattgatgaattatctgcaaaattaactgatgaagatactaatagattatcacgtatgagaaatattggtatttcagctcatattgattcaggtaaaacaacttttactgaaagagttttattttatacaggtagaattaaggcaattcatgatgttagaggtagagatggtgttggtgcaaagatggatcatatggatttagagagagagaaaggtattacaattcaatctgctgcaacttattgttcatgggatagaacacctgaaaaatcattacattttaatttaattgatactccatggtcacattgattttacaattgaagttgaaagagctttaagagttttagatggtgcagttttagttgtttgtgcagttagtggtgttcaatcacaaactgttacagttgatagacaaatgaagagatataatgttccaagaattacatttattaataaaatggatagaatgggtgcaaatccttggaaggcaattgaacaaattagaactaaattaaaaattcctgcagctgcagttcaagttccaattggttcagaaaaagatttaattggttcagttgatattattaataaaaaatcaatttattatgaaggttcacaaggtgaaaaattaagaattgttaatgaaattccaaatgatttaattgatttagttgaagagaaaagatctgaattaattgaaactttagcagatgttgatgatgaaattgctgaatgttttattgatgaagttgaaccaacaattgaacaaattcaaggtgcaattagaagatcaacaattgcaagaaaatttactcctgttttcatgggtacagcattagcaaataaaggtattcaacctgttttagatggtgtttgtgattatttacctgatccaagtgaaattttaaatactgcattagatttatcaaatgatgaaaaatcagttaatttaactgcatcatcaaattcacctgcagttgcattagcatttaaattagaagaaggtaaatatggtcaattaacttatttaagagtttatcaaggtaaattaaagaaaggttcaatgattacacatgttaaaactggtaaaaaaattaaattagctagattagttcgtatgcattcagaggaaatggaagatgttgatgaaattcatgcaggtgaaatttgtgcaacttttggtattgattgtgcatcaggtgatacatttactgatggttcagttaattattcaatgagttcaatgtttgtcccagatgcagttgtttcattatcaattttacctaaaactaaagatgcagcaaatttctccaaagcaggttaatagatttcaaaaggaagatccaacttttagagttcattttgataaagattctaaggagacaattatttcaggtatgggtgaattacatttagaaatttatgttgaaagaatgaagagagaatataatgttgaatgtacagttggtagaccaagagttgcatatagagaaagtattttaaatggttcattatttgattatactcataagaaacaatctggtggtgcaggtcaatttgctaaagttatgggtaaaatggaagcaacaagtttaacaaatgcagaagaaattggattaacacctggtgatgatattaaattccgtaatcatttccaaactaaagttgttggtggtaaaattagtgaaaaattccttttagcatgtcaaaaaggttttgaagattgttgtgaaaaaggtccattaacgggttcaagagttttaggtgttcatatgattgttaatgatggtgcaacacatgttgttgattcatcagaaatggcatttagaactgcaacacaatttgcatttaaacaagcatttatgcaatcacaaccagttgttttagaaccaattatgaatgttgtaattactgcaccaaatgaatttcaaggtgcagttattggattagttaataaattaggtggtttaattaatgatacagaaaattcaagtgatgattttaatgttattagtgattgttcattaaatcaattatttggatttgcatcaaaattaagagctgttacacaaggtaagggagaatttacaatggaatttaaagaatatcaacctgctccacctcaattacaaaagcaattaattgaagattatgcaaagaagaataaaggtggtgaataagtaaagaaaagaaagagaagaactaaattaaattaatatctgtatatagtataataataatagtaaataattaattatataatttaacaagcacaattattataattatcatcatcaacattaatattaacagcatcagtataatcatcattaaattccattatttcttcttgctttaaagcacatcttgcaacaacttcaaaagcttgatcaatattaacactttcctttgcacttgtctcaaaataaggtaaattacctaaactattagactaaagcttgtgcctttttagttgaaattaatcttttaccttcctctaaatcaattttattacctataataataaatgggaaattatcaggatctttaatatttgcttgaataaggaattcatcacgccaacttgttaaattttcaaaacttttcaaatttgtaacatcataaactaaaacacaacaatctgaacctctataaaatgcaacacctaaactttgaaatctttcttgacctgcagtatcccaaatttgcattgttatatttttatcatcaattatcatatcctttggtaaaaaatcagctccaattgttgccttatattgttgactaaatttaccattaataaattgttgcataagtgaagttttaccaactcctgtatctccaagtataattacttttaataatgttttcttttgtccagccatggttgtataaaaggaaatagtggataatatagatgataaaaaagcgactgtataatatattaattaaacatgaattataattataaagattacataataatatgatagaataatgattgattacctaattaagtatattctttatacttggatgtctcttactggtagcagaagtatcatcactgatattatcactctttaatcctacaagtacatgagaagcagccttaatatcatcattaacagtaattggatttttttttcttatattgtataacattattagaaactgcactaacagtattaggtattgtgtaggtataacttggagaagaattagataataatgaagatgaagatgaagatgaagataatgatttagctcttttaggtaattcaatatctatatgtttatcaataatagcaggtaatggtaatttaaaagaatttgaatcattttgtaattgtaatattgatttcctataatttgaattttcatttattttattcctaatattgctattgctatcattattattatcattatcatttaataaattttcaatttctaaattaattggatctaatttattattattatcattaatattattaaataattccaaaagattaaaatcattatttaaatctctaaatttttgtaaatcaatatcaaaattacaaaaatcaagattattattttttaaaagccaatttttaacattatttctatttgatttttgttttaacatttgtaattttaataatttaataattaaatgtaaatatttaatatattcaacagttgattgaagtattgttaatttatgcattgaatcaattatatcagtattattattttcaatatttgataaaatatttaatctacaagcaggtattaaaaattttaaagcatcaaattctctattcattttaattctacgtcttttttcaataattgaatgttgagttttcaaatctttctttttacgttcaatttgatcatttgttgataatccattattaatagatgattttcttctttttttaggatttggtaattcatcaatatcattaggtaaaggtaaattagtaaatctagtcattggagatattgaaggtgaatgattatataaattatttttattatattcatcatttgaaataaatgaagaagttaagaaattagtatttgtattagtatttattactatttgacactgagtcattatttgaaattataggtgaagaatttgaagatataaattttggtttaaagattggtggaggtggtaacattgtattagtattgttagtattagtattagtatttattattatacattgtatattgatctaataagaaagttaatttaaatagagatatgaaaagggggatataaataggttattatataaatataaatataaatatattataaacagaactaattaattaaagactcgtgtgcatagttgaataaatgaaggatgtcttgagtatagaataagataagataataattataataataataataataagtcccccatgtggtatataaaatagataatatagagcacatgtctcttactgagtactaaatacaatagataagaataataataataattaataactgagcctctttttaagagtcacgtgatattacgtaatgtattattattacgtaatgtaataatttgaaggctcatctaattttaattttaatttaacccctttacagagggctcatctctttttaaacattttccactatttcaactataaataaagcactttccccccgttttattaatttatttattatcctttactatcacttctttcttttctagtattatattcttatcctatattaaccagggatataatcatactgtataacaaactgtatataacaacttttcatttaatttactttttttctcactggtgaaaaattaatttcattatcacaatgactaatactattatgataataatatataataattttcccctaatttatcctttttttcaaatttaaatttttcattatcttatccttaatataccttcttattttatctttttctgtatataacaaatcacacatttatttgcttaatatacactaatacacacacatacacataatgaacactttaaaatctcaaaatcaatctaaaaatattcaaaatattcaaaatatccccctaaatcatccacatgcttttctaccattactattgaataatacaaatacaaatacaaatacaaataataatacaaataataatacaagtataactaacatatcagaaaatatacttgtactcaaatctttactaatattaaatttagttttattagataaatttcatcaacgttcaaataactcattattattaattcatttacgtgatttaattgataaatctattgataataataatacaaatgatttattatttgataaatttcttatatctgttgaatttaaaaaaattttaaatattttcaatgaaattttcaataatgcaaattattatggattaattgaattacattcaatttataataatttcattaaaaaactaattaataacaattcatttgatataaatatagtaaatgattttataaataattccctatgttgttcaaattcaatgttaattctatcacattttaattacatttatccaacaaatgatcaaattaattcatttcacctagattcaattaaaactttctatacaaactcttttaataaatcatcaactaactacaacaacacttcattactcaatgcaaataacttaaatatcgttaattctgaaaatttcttaaatttccatataaatagatggaaaaatttaaatttattagatactcatattttcaaaatttcaccttcaacatcttcttctttataagctctctctctctctctctctctcttctacttcactccctttttatagattttaaaattaattaaataagtacatcatagtaaatgaatttggtagttaaactaccttcaaataaatcacttaaagtaataggatttgcagattctcataattggcaaataaataaagatttaacaacagaaacatctacttcaatattggaaataccgattaatgattcaactaaactactcaacgtattaaatgatcataatcatggatttggtctatacattacaatcaataataattcttatgctatgatatccaataataataataacagtaacaacaacactctttgggcattaaataaactatcttcaaaacctatacttaaagaatttcatgaaaataataaatctcttaataacacaatcagttctactactacctacatcaagtaaagtaacagatccaatcaaatatttaacagaatcatatttgaaaatcttatattcatctaatatacctgttgatagttttattaaaatatcattgaaaaaacttaatcataatattaatgatactaaaattcaattatttaaagattgtctcttaaacttacttattaaatcaattgaaaatttcgattcacgtcataataataataattcattaaatatttggttaagtaataatttaaattatattgataaaattgaatcaaattatagagataaaagatttaataaattgaaaaataatttaaataatgaagatattataaattatttaaataattttaaattaaaggatttaaaattacaaataataatatgttttgaattattgaaattatttcaaaataataataataataataataataataatttattaaagatccaattccaacattaattacacgtaaaaatcattcaattaatttaattggtaggaaaaataaaaagaaaagacttataccaactttattagggacagttataccaacaaattttgaatttgatactgattttagacatattgataataataataataatgataataataacattgataaaaataaaattgaatcactaattaatttatattttgaaaaattatgtaattgggatgtaattatgggatttgattacaaagatattaattcatcttgggggttcatatcaacttcactaataccatattatgaaaaatattttaaaaaattattaaataatttatcaattaaatcaagaggacctgtatatattttaaaattacgtgcaagagaggaaagattgaaaagagatgaaattaagagattaaaatcaataacaacaaaggaaaataaagaaacttttaaatcgaatacaattgatttatcaagtattaaattaactagatcacaatcatcatttagtaattcaaaacaatatcttgaacgtaaaacttttagtatgactaaatcaactccatcattatcattatcaagatcatcatcaacattatcaacatctgaacctattaaaaagaggaaactttatgcaccaagtaattcaaatttatttcatcataatcaaataattgaagcaactccacgtaaggaaaatcgacattcaatgattatttcagaaactcctaaattagatattaaaaaaggtgaattacaaataatttcatctccattgaaaaacacagtaaatcaaatgcaatcacaattgcaatcacaattggaaatttcagaaactcctgtattagatagaattcaaattaaaccaggatttttcgaaattaattcatcaccaatgaataaaaataattcaaatattataacttcttcaccacctaatattaattcaacaaaacgtaaattaaatttccaataataatactaataaattatatataatattacttttctaattaaatacacttttatacactattcaccaaagaatataccatgatatattaaaattgcattattttcactacatatcctatcagcaattaatttaccaactctttcacttaatttttccttcatttcatcattcaaaacttccccctctttaacaagtaattcaccatcttttgttaattcatttaaacattcaattaattcatctaataaaattcctctattttcatcatcttcattaaaattttctaatacaatatttgaccaattacgtaaattaccaattaaaataattctaataacttcacaacctaatgatttaatacctaaaattgaaccaaattgtgtaccaaatgaatttctagttgtattacttaaaaatgctctaagtaaagttcttgtaattcttggttttaatgtattatatgatgaactaaattcatcaataatttttttcaataatgatgatgataatttccttacttgtaaatgacctttatcatttaaattaattggtccaatattttttgataataataatgttaaaatacatggcattaatgaatgaatataaggatctaaaaatattgaattatttgataaaattgaataaattaaaattaacattgttgttaataattttaaattttttaaattatgtgtaattgtttcagctataaattgaattaaatatggaattaattgatgtaatccagtatctgatttaattgattcgaaaactgcagttttcaaactttcatttttttcaatatctacttcattttcttcatcatcctttaataaaacttcaataattttattaaaatataattgcatttcctttgataaaacatgtttaactaatggtttaatttctaattcttttttatcaatttgttgtttattttcaattgttgtaattccagtctttggattagttattaatgaaatttcttcattatttaaacttaacatattatctaatgtacctctttcattaattggtaataattttatatcatttaaattaggattttgtggtattgcaggttgaacaccttcaattgctaaccaatgagctgaacatgttgtaaatcttggtactttaggtaatggttgattaattaatgattcaaaatcaacttcatcatcttcaatataatataatgtttgaccaggtccaatcattgcttctttgaaaattaaaggttttgatgtatcatatccatataatggttctaaatttaaaattttcattgatctttcaatatcttgagttgttaatatatttcttttactatgacgcataaattttaatgcttgttcaattatttcattaattctatattcaatatccattgctaaatttttagcaacttcatcatttaattgaattgaaatacctaatttatcactaacatctcgaatagtatcatatggtgaccataatgtatgtgataattgtttagtactctgcgttacactaggtttattcttcgttcctcccttctttgacatggtatatcgttgtaatttttgtaaaaggaaatcagtgataattaatcaacagtgtcaatattcatgttcatgagaaattaaattcaatttactatatacacatgtgattacgtaataatttacacattatacacctttaggattaataaagaacacttctccattggtctctctcttgtatgttaatctatcagctactgtagctgcaaagatcaaatgattcaatgtccaattacccctatcgaaaactgctggaattttcttacataaacttgggaataatgtttcatataatggtaaatattcattaatatcatcattatcaataactacagttttcttaacattttcaaattcttttaaaataaatgatgggaaattagattgttcttccaatgggtaaacttccttattagcaattctcataatccataataatactgcatgatctaatatacctttttcaattaaatcattatatgttcttgtaccgaaaactaataaaaatgcattgaaaaatgttttatcattagccattgctttcttaaatgataatggtttaacatgtaaaatcagtttcttctctaatttttcaatattctctaatgattcttggaatatttccttttgtgattttctatatattttaattgttttagcatgagaaatagttaccttttcagatggtgtaacatctaattgtttaattgttttcaatttagttttaataatagcctttagttgtgataatccttcaagtttcattcttgatgtaaaacctttcttttcagatcttaatttaactaaatatgagaaaaaatttaataaatcatcacttaattgagaatttttatttataacaaaattaactgaatctaatgttgaatcttttggaattttaacaccataagctttagcaccttcaataacagatgaatcaacttttaatgataatgtagttgaatcaaatttattaccctttaagcaaaatccataattaagtaaatattctccattactcttatcaccataattattatataattcacattttttattcaatttctctaatggatctaatgttttaaatacaaaatatttatcatcatcatcaatagtttcagtttcccatttacatatacttttttgttcatcatcagtattaagtaaatcaacaattggtaataaaaatgcacaattattttccttatcgaacataacaaatgggaaagctcttgatttaagaatacaatttgaccataaataagctgtgaaacttgtccaagaaatttctttaatatttaataaataattaactgcaactccaccatttggtcccattttaaatgcttcatattctaataattcatcctttaataaaggatatttggcaatatctaattgtgaaacaattgatttccaatcttctaaatcttttaaaaaattacgtttcatgaaaatatgtgcatctgtaccatctaataaatctttttcttccatattccaaaaaattggattaccagtttcaataccattatctggtaaataatcaatataaggtttaaatttcttatttaaattttcaccattaacaatagtttcatcatttttgtcaaattttaattttgataaaaggaaaatcatttcaatatctttattatatgtcttattttcaacatctgggaattcattttggaaaaattcaatactttgatcaggtaataacattaatttttgtggaattttgattaatccttttgatatatcatcttctgttaaactatcattgattatacatgaaataccatgatctttaacattttcaaaacttaaattttcattaatatacgaaccattagatttagcccaatctaataaattattaagtttctctaatgacatttaggtatttaggtatttgatgatttgaaaaaaaaaagggtttatcattaatctgatatatattttttttttgacatgtaattgtatcaactctttaatgttcatcaataatttcggaatattccagaaataaagaaataaaaattaaaaactagaaaaaataaaagttaaatgatcgaacccaggatcaaactggggacgttatgcgtgttaagcatatgccataaccaactagaccatccgaccacttagttgtcaaaaactgactagggttcctcctattgttgtgttacttacgtaagcaatttttgatttattattataccattttatagctttaaataatcaaataatagttatttagtttttatatgtagagatatatttgaaaacaatttgaatcaaacagaatagtaaaaaaaagcatttcaataattacccgatacccgatacccaaaatttgaagaatttgcaaaatatccgagaaaagggtacttttttcaaaatgctttttttctaatgaattaacaaatataaagcgaatacaaaatgttatatagatagcaaagattaatattaatgattcaattatagtggtaattctttgagtaaagagaaaactgaaaaaaaaataggcctacttaaccaaccacctaaaatataataaccagttaatttatatttatttgttttattaaaagatttaatatttgctcttaatttagcaatttttctaaatttaacatgattctcctgttctaatgatttaattaaggttttagtctttttatttttagtgataatttcttcagcttctaaaacttcagatattaatcttttctttgaattaataatttcatttaatttatcattatttgaattaattacattattattatccattgatgttacaattgcttcacgatatttaatttcttctgaatctgaatcaagtaaatgtgaattttccatagtatttttacaaattctattaattctatcacaattataatcattttcatcctttgataaattatatgcccaatctagtaataaacaatctttaatatcattaatattgttaaatttaagattatcttgattatcaataattttaacatataaatcagttttataatctgttaaaaatatcatttgtaatgttgaattcttaaataagtcatcaagtaaactatgatgaagtgaattaaatgtattatgttttgatccatagggataattaatacgagaaataaattcattgggacattgtaaaaataaaatatcaccatttcgaatacaccagctatttgtcttagacttttgattatttatcactctaatatcaattttagagccacatatatttgcaataataattggttttgcagaattatttgtaagataaagctgttcatcacttctttcctttgtgatattaatatttatcagattattaacattatcaaaaggtaaatcaatcccttgatgtgattcaagtgattcaaagcgattacctatataaatttttgattctggtttattttttatatttgaataagatacttttcttaagtcaaactttgtactaattggatagttggaagtcattgctgctacagagaagaaggtatgttatcaaagaagggaataattgctatccttttcagatgagccctcatcttatcctaataaccctcttaataccttacccgataaacccattaaatactacccgaaaaaatgcaagttgccgaaaaaagcgcacttttttgaaaatgcttttaatttcaatgaattaatgaattaatgagttaattataaagcgagtggttaggtagcaaagcatgggaggtatatagcatataagttaatcatttattttttgccagataacactgcataaaagataaaactgaaaaatccagcaacaaatgcatatcttggtctctttgatctcttacgtctatcaatctcatcttctaattctttaatagtttcattcttattagaaatttcatcagttaatgtcttaattaaactatctgatgttttactatcaattatcatattatctgcattaataacttcagaaaataatctttttctcttatttttaataactgttaattgtctcatttgttcttcaataattggacaattttcattatttttattattagtaattggtgaaggtggtgtatttggagtaggatctataataatagtttcaactttctttgatggaacttttggcactgtctttgatggtgttgatgcccttgatgaggctttagatgatggatttgaattattgttaagttcatttttaataatattatccagtctaataaaatgttcatcataactatgaactgcatcatctaattcaacatcaaaatcttctaatagatatttcttaatatcttgtaaatttttaaaattaccactaatattatcacaatttgctctcatgtataaatcattttgataatctgtaaggaaaattaaagctaattcacattgtttcatagtttcctcaaatgaaagctccccatctctattttcattgaaaataataatatcaccatttttaacttcaatcgaatcagttacttcatcaattattgtaacactatggtcaataacattaacaacatagaatcctttatttgaatgatttatgaaaagtaattcgttccggttagaacgtctataaattgaaatatgtttagggctaacagctttatgatcaattatgtaataattgtttttattaacagtaccatcaattttactaccaataaaaattacatctctttgtgattgacttggaataacgcgtgttctcttcaagtttaagactttagtttgaaattccatcttaggatgccaaaagaaataaaggataataaaaggaaagcaaataaagagcctaagttatctctttttataataaagaaaattgatgagccctcgtagaatgcgataagaaaattattatacgttattatacgttatgcaaagcaaagattaaattaaatttatatagatgattactaattattatgatggtttaacaactttatttatctcgtgaagtccgttcatgaactgtgaaaaattagctggttttgattgtgaaatgaaaactggaccaattgttgaatttgaaaataatggataacctgaaagtgaatatggcatttgatgttgagtacaaaattttataattaattcaggatctgtataattatcaacatattcctgggaatataggataatgcattgccttccatctctgattctattgtatttgtaagtatatttggattatttaattcaactgaaagttgttgtttaattttcaatgctctaaatgtatttacattagtttccttatttgacataaagaaaacagttgtatttgtacgaaatgtatgaattttatcattaagatcatctttttcaacttctaaattttgtgatacaattgattcaggttctggatttaaatgtataatttcattactagtcattttcctcaacctctgcatcaccatgatatgaaatgatatctttattattattttcaaatacatcttctacttcgttattgaaaacatcaattttttcaagagttgataaacttaattattctaatattatcagatatttgataactatcttttgttaaatttttcatttcctctttaattatattactaactttttgcatatctttccaagaataaccatttgattcgaaaacagttataattctaacacctgaacatgaagcccaagtaatacatttagcagcttcatataaaactctaaaagattcagcggctttatgagtatgatgcattgaaatccattcagctctcttggctaaaactttagcaacttcctttcttatcaggtataacaattttcttttcataatctaaatatggtgttggtacctcaggtggcctttgaacaactaatggactcatttcaaaaataaaagttatatgatcaggtatatataatctaccaggttgcttgtctaattttcattcttgatcttggtacaaatgatgaaactgatctttcaagtataatattacccaatcttgtaggtaataaagataattgattataataactgtaaattgtttcagttattgaattattaattgatgaatctgaagatttatttaaattaatagtacttgaactaaaagttgcagcaggtccaacagttgatacatcttcaggtaatgataaaaaagttaataaataccaagtatatgaaataatgaaagtataaatttcgaaaaattgtgatgtaatccataacccatattgataaatagtaaaataaatacttagaatacgtcttaaaagtgtataaaataaacctgtaaaataatcactttgtgataataagactgtatttgtaccaggtacagcatatttaacacttgaagttaaattttggaaaacttcatcatcttcataaatatttatagttgaaaatagggtatcaccatctctaaatcttggtttaataattgatgattgaattgagtgagaagcagattccacagcagcagttacgtcgttcatttagggatggtttcctaaaaggaaaaagagtgtaatatcaggagaaaaagacatcaaggggatagcaaaagaagatagatggaaaggatgagccgccatatacaagattatgcccccctacgaaaatcggtaattaaattaagccattttattgatattttacataataaacatgtttaattggttaataataatataatatagagaatatagaaaagtctataaatctaagccttagcaataagagatttaatttgatctttacctaaagcttgtaaatcagaattaccaccaatatgtttaccattaatgaaaatatttggtacagttctttgacctgtaattttagctaaagcattttgaatatcatcaccatcttcaattttatctaattcaagaactgaaagcttcaggataaacttcattaacttaatttctttgcagctgtacaatatggacaataagtctttgatgcaacaaatacagtctttgtattaattaaattttcaacgtgagcaattgtttgttgagacattggtttagttgttgtaaagaatcttctaactacggagaacaacttgaaagttatcaaaatgagaagaagtaagtggataatctccatttaaatagtagaaagaaggcagagttgccactggacaggaaaactgtggcaatttcaataatttttagtaataagcttatagtagtaacatgaaaatcttcattttattacgtaatcatacaatatatacaataactattacttagaacaacccacttcttttaagattttgctgtattaccatatctgtaactgctgtaagaatgaatttcattgattgagtatctgtagcacatgttctatgaacataaattggtcctctttgtcttatttaaacttaaaaataatttctcaaaatattttaatgcatcctctgcatcattacttttaccatcaaaatctgggaaatatttacgtacaggtgatttacgtactttatctttcaataaatcaactttattcaaaaataaaataaatggtgtatttgcaaaccatttggaattaactaatgaatcaaataacataattgcttcatacattctattcactcgttcatcttcaaataacatttgatcatattctgaaactgcaagtacaaaacatgcacatgtaatatcttggaaacaatgaatccatttctttctctcacttctttgtccacctgcatctaataatttaaatttaattccattaatattaaaatttgtctcggtaataccagttgtcttaattctaccctttaaaatatcatcagtcattacaaacataatcatcatcctgcatattttttaacattttcaaaaaaatatggtgatgaaccctctaattgaaataaattagatttattgaaaacttgtttaatacctttatcatttttccataatttattaattgcatctgcaatttcatcctttgttacatttttattaattgttgatttaattggactattaaatttatctccaacataatcttttaataattcatcagtttccttataatcatcaattaaattatctgaaactaatgtaccatcagttgaattattattttcatcttctaaccatccaatatctgtacgtccattactcttatttcttctatctgttgcacttctttcactatatttaactaaataatcttttaaaaatgttgctccacctgcagctggtgtatcaatactctctaaaggttgataatttaaaatcatttgctttaatccatataatgaattatttggattatctgattctaattcaatacctaaatttcttgattgaataattaatgtttgcatacttgcaactgtatctgcccaaattatattcttatattgatttctctcttgtggtgaaaatcctcctaaatgtaataatctcatttgttttaaaactgttgatttaccactctctccagctcctaataataacattttaacttgatttttcttattggctttaccttgttgcatcattttctctaatttattatcttgtaatttttgtaattgattcatatctggttgtcttgtttggacattgttattatcagttaaaattattattattttgtttttgattaaactgtgaatcaactggtgtacttgctgtgcaccccattgtgtatgtatgtatgtatgtatgtatgtattatgtatgtattatttatgtctgtattatttcaatttttaaatttatttaattaaatgtatcctaactaaaagactagattgttaacccactacagctactaataaatagatgattatagaataagaaaaagaaaggtaaaattaaaataaaattagaataaaactaaaataaaatgaaaacaatttacaaccggtaataatattatacaaaatcctagaataactcagtaactttactataattccaacaatctgaaacaatacctccagactgtttattgtatggtagcaaataaatgctacacttcctatacaatttaattccaattattcgcattttctgtttcatgttgcgcacagcccgtcttttgatctacttaaactctataaactctataaactctataaacgatactaagtatcttggtcgtaatcataactggcaaatatatcgtattcatcttcaaatacttcaccactctcaggttcattaactgcatgaagtttactcgtaaaaattgtaactcttttagtacccctttgattactagtattattattattattattataatcaccaagatttgcggtctcttcaataactggtttcctcttactcatgaaactactgaatatattccaattatgtttcctaggactcctcatcatgtgaagattttttaacattgttattattctcactgggattgtattgaatcatcttctttgtattatttttcaatttcttgaaaatacttacaaccctttcctgttcagagtttcttgaatttattattcgtttactaatttctcttctcttttctctattaattttatcaggtctaacataatttttaacttgatattctcgtaatctttccatttcattacttgatatttgtgaatttcttgaaactaataaatttctattgaaaaattcaggtctttgaattaatggtatattagtaaatctttgtgttcttattaattgtccgccaataggattggaatttaatgttactctattattattattattattatcaaaagtacttctagtttcaggtcggactttatttgatatccatccccttaaaccatgtgatgtcatttgcttttgaatagcaattctatcaccatcaaatcctaatgctttatatttagtctttctcttgatattctttttagtaaattccatattatgaaatatatcataatcaccatcatttttatcattttcgaaaacattatttaaattaatatcattagtaaaattatttgaattaataacttgaatcttcttattctcaaatggttcatctaataaaattgattgattttcttgatctctcatatgattatcctgctgatcatcattatctccatttccttgtcctctttgacaatatgtatcataataattaggtgtttttcaatccatttattgattttttactctctgcaaatggtaataaatatccaactcttgaataagttaaattaacactttcaagtaaatgtttctcaaatgaatctaatgatccattactttccattgtaaaattattaacaacacttatattatcattattatcattattcctttgaacaattttaggatcttcatatattttaaatgtttgtctattaccatttttttgctttcttctctttggttgatttttcaaattaatctcccttaatggttgtcttttagatttctttacatcttcatttatttgataatcaattgatggaattggttgccaaaattgatcccattttttattaacataatcatttttcgaaataaattcagagaattcctctgatcttaatgatatcaatggtaaatttttaggtcttgaagtaagtaataatggattattatttggattaccattatatctatagaaaatccaccatctatttaattttaggaaagctctcctaaatcttatctcaaatcgatgatcattacgatgataatgattttcccaagcgcttaacattttaatatagtaataataattatataattataataataatactaaaatcaatcctttttattacttttgaaaagcactttgggggagggaataattacaagcaaagtttgtccttcagaaggagtatagaaaagataatgaaatatccattcatgtagtttcaaaaaagaagttgtaacaatccagcttaaaaattgccttgtttcggagttcttatttttttcaaattttaactatttttattggattttttatacagattttatatattttttttgatattttttttgaatttatgtgtgtatgtgtgtgtgtatgtgtgttcaaatgttgattggatggaggtaatataatacatcaataatatacaattttaattttaactttaattttaatcattctgattttattcatctttttcattatttcattaatttttaccaattagacttaaaaaacttctattaattaaatcttttaaatctttataactcattattaaacaagtcatttcatctggacttactaaaagtaaattttcatcaacacctgcatcaagtttattcaaacaatttataacatgagttaaatcaacaactggtttaccattttcatcaacttgatgaaatacataatctttaaataatttaattggatatctttcaccagtttctgaccatgaaccatctttaaccatttcaggtctttcacttataaaatctaattttgaaattaatctaactaatcttgcattctctaattcactcattaatgttgattcaaatgtatcacaactattttgtaatccattagttaattttaaaatcattggtgcaactaattcttgaaatttttcaattgttgcatcttttgaaaataaatatattaacattttcttgaaaacattagtaaattttaattgtgaaataatttcatatggatcttcagttggattttgcataaatgtagttgatttagctaagaataaaatcaattcacctaaatttaataaatcatttgaatttaaatcagattcatcatctactatacctaatgatgatggatcatttgatgcatttttcttctttacatctcttaaaatatctttaattgctaatgcggataatctaattctacctttattagtaataataattttagatgaatctaatttaccaatatttaaacctaatttatttatttcagtaattgcatttaataattgaattgtataattccataaaatatcttcagtaattaattcaggatttttaccaggaaatgacataaaatgattttcaagtaatgtcattgacattggataataatcataaattaaaataagtgaattatcattaaaagctctagttgtgaaaacatcataaattttaacacaatttgcacaatcaacttttttccattgtttaaaagattttaaaactgatggtgtagtaattggtacatttttcaatcttctcattgtataaagtttaccatcatcatttgacatacatttataaacaattgatgtataaccaaaagattttgtattataatcataattatgatcaattggataaagtgaatgataagttccaacatgtaatggtaaatctaattcattatttgaaattgattttaaactttcttcattttttaattgtaaatattgtcttaattgattattaataaataaatcatcaactgttctttcattttgctttttatttaaattaacatgaggtggaggaggtggtgcgtataaaagaaaattaactggatataaattagtattttgataaaataattcttcaccagttggaggttgaatattatttgaaaaattatttggtaaaatatcattactacttggctttggagtgaaaactggtgcagtcattggattaaatgatttagttgttggaagtgatgttcttaaagcattaaaatcattaagacctgatgatgtttcatttaatgtatttggtaaaggtgtagataaattattcagagttgatgaaatcgttgttgcaggaatatttgttggaggtaaatttaaattaacttgatatcccagttgaggttgttgtgattgttgtgattgtaattgttgtgattgttgtggttgttcagtactgttatttgaaattgttgatggaataaatgttggaatttgatcaactgatggtgataatgttgaaaatttacttaaacttataggtgtaaaagcgggtgaatcaattttgaattttttattatcaggggttgaagaaccaaaattagaattaattgaatttattgatgtttgttgttttaataaagttggtttaaaaatgggtgcctttgatgcattatttggatcaattaaacttgaatttgcagaattattattattattattattattattcaatgatgcaagtaaagcagatggagatactgatttacctaatgttgcatttgttgttgtagatgatatagttggagatattggtgatgaatcttttttctgttcattttcttttgctaattcatgattatatgaacaacctttatgttcaaatttacaaaaaccatgaatttgaacattcctacaaggaatattcttagcccagtcatattgagacgagctcattgtgtttttatatattcaaatgattgtattagtatattgattataattttttttcctcttttcttctaattattaaagaaaatttataaaattaatgagaatttctaatgtacagataaattaaggcaaaataagttgaataatataacaatataatgtaattgtaactatatgagcctaatttgaagtgataattgtttaaataaagtaaagaaataagataaaataaaaagaaaatgatacaatacatacacccatccacaaaacaaactgcgtcaattttaatgttattacattttcagataacaacaattgacttttgatgaatttcaactgctaagaaaaaaaatatcgtgtttgattatgcaatattaaaaaatagagacattaaaaagtaaaaaaacttaaacactgaagaattccgggctaccttcttattaatggggtcaactgggaattgaacccagggcctcctgcacccaaagcaggaatcataccactagaccattaaccctaataagaagcggcaattcaatcaaaatgttcaagaaatgtccctccggccgggatcgaaccagcgacctcaagatgtcttgtatgctgtttaagcctattacagtctcgcgctcttccaactgagctacagagggtttctatgatgtctaaaaatgggtgattatcctcggtattaagattttgtagtcacgtgatttgggttttttggaaaatactgataaatttgacagtataacaaaaatactttttaaattttttttatatttgtggcaattaaagtcttttaaaaatagtgagaaagtttaaatatcaacaaaagcccttaaatcacggaaatcattagaattcattcaatatcttctatacaaccatacaaagattactatgaacaatcatcatagtcattttcatagccgcatctcatatgctacattcctatctaataatctttttattatttcctaaaacagacattaagtaacattaatttgctcaaattttaggcgcacattagtcagaagcgagtagatcaaacggttgatttttcacgtcaaattgataattccgataaccaatttttcaatattatcattttttcttctttcaatccctccaccaagcgatatgagttatacaatcaatcaaattaacaataaatttaacttaaatgatgaaggattattgaaagcaaggaaaatttatgaaaatttatcagtttcatttaaaggtccattaacaattgaagatttcaaacatttagaaatggaacattttgaagatattaatggtaaatcacaatttttttatttaacttctaacaatagtgatattgtttcaacttgtgaaattgtacctcgtaaaggttatcatgaaaattcattaaatttattattaagtatggtttatacaaatccaaattatagaaagaaaggattagtttcaaaattattaaattgggttataaaattttatgaaaatcaaacaattgatcatgatgatacaattattatatctgaatctattacaaataaggaatgtatggaatattttaatgaagctgttccattgaaattccgtgaatctaataatattaattggtcattgtatagtatagttggtacattctatcaacaatttggttttaacccatgtgacgaaattaattggtttcaaataaattcaagtgattttccaaatgaaggagaatttcaaattaatgaaacaaatgaaaaattattgactaatgaagatattgatgattattattttaatgaaaaatataattttactccagttaatgatacacaattacaaaattgttcattagaggaatcctcttatgctggttttgttgcaagatatcaatcatatattgaatttaataaggataagtttaaagataatgatatcaaatttgctaaaaattgtggtttttacattaaggaaattgttaatggtaaagaatatgaaactattgcatttatttgtccattctttttcatgaatagaattgtcattaatagaattttcacaaatgctgaagatgaaactattttcactaaacactgggaaagaattactaaatttgtgtctaattatgctcaaaatgtatggaaaactattccaggtttggaaacttattcagattctgataaattagttatgacagctgataatgatattgttgttaaatctgaaaatcttaatgttcaagacatcactgatataattaaaaaatccactggttgggaagatgtaggtttaggtatggtattaccaatgattagagattggaaatcattaaaatcaccaccttcaaaactggctcataatggtcattggtcttttatgtaatagtagtttatataataaaaagtttaaaaaatttagaaatagaatctatttattaattactttcttggtttaacatcatcaatccaattttgtgtattcatttgtgtaagtctacttaaagctcttgcaaatgcaaatctttcttcatcaagatgtgcaaacatgaaagcttttttagcaatttttttatcaaaaccatgttgagaaaccagtaaatcattttccattttatcatcaatttcttcaggagttttatttgataatgcataaacactatcaccaatattttcaggttcaacgaaaatatcttgaaatggagctgcagcagtaactgcaattcttgaatgattatcataaactgcatctaaaaatgtaataaatcttctaaccatatcacgttgatcaactgttaaataaggtatatcagtaacaataattgattcaaaacttgtagctaaagttaaataatcacctgcagctaatggttcaccacataattctttaaaagtaaattgtgcaacataaggaggtgatgcctttggaactattaaatctctaccccaaatacgtaatggaacattattttcaattttatgaccttgactgaaaaattcataccataatttaatatgatcatttctttgtttagtacaagattttgagaaataaccaacaccaggttttgggaaataaaatgcttgtgatacaggtcttggaattttacgataatcagttggtgaattaaggtaaataacatgagtaacatttttaattaatttaatacatggaataaaactttctctttgaataccattaatatataaatcatcaggtgctctatttgaagttgcgaaaagaactaaaccatgatcatatcttaaaactaaatttaataaacgacgtaataacattgcatctgcaacatcagtaacttgaaattcatcaaaacataaaacagttgcagattttgataattcccaagctaaatatggcataacatcaatatcttctctattaccatgtaaaacttttaattgatgagctcttttatgaatattttgcataaattgatggaaatgtaatcttttctttgataaatgaggtggaattgtatcataaaataaatccattaacattgttttaccacaaccaacatcaccatagaggtaaataccatgtggaatttcaatattttgttcattttcaacttttttctcaattgatgaaaacagtgaagagaaaacttttgtaatattaaatgatgaactaccactacctttaatatttctactttgtgttatatcaggttgagcaacatcaggtggatgataattcagtaaatctttatataaatgttccatactagttaatatacctctttgaaattcatcattatttaaacgaccttcattaacacgtttatcatatagttcaagcggtgaatataatttattatttgcagttttggaacctgaattcgatttcgtcactactggagtatcatttttaattattggattagttttagatgcaggtgtgaattctgtaccagcagttgaagaaactgtgggagtaattgtcttttgttgagttgttgtctgtatttttcgtataaaaccggaatatatgaaagttctacaagtaaatatagttttcgatctttgttttattattgttgatatcattatgtgtgtttggttggtaatgtgtgttctataaagttgaatgttaaatcttaattgaaaaaaaacagaaaaagcaaaacagtcaagtaatctctagatctatctatctatctatctaccaatacctttacttatcaaacggtgaccttccttgtcatctccggcagaaagcttcaggaagaaagaaagagaggaagattaaaagcggagaaatcggatcgtcggtggaaaaaaaattatttttgtttcagttttcagttttcacttctctacactgtactattctttaatcacacttgacacagttctatatatccatctcctagatctaagtcaagatcaatagcatcttcattaataggcgtagtatccacatcttcctcttcctctccttcctcttcctctttatcaaaattaggtcctttcatagacttaacaaatccaacactatccttatccgtattccgtgtcggagttttatcagcggagttgttgtccattttaggagatgatgcaacaaatacctttttctaaataaattttccttcttaacatctccttataagtagtttcattaccattctcaagttcaaatgctttaaataatgaccaaattctctcacgatcttcttcattatgattaaattccattatattatcacttgcatattcaagtatatttcttgcatttccaatattacctaatgaaacttcaattgttacaaatcctgtaacaatttcagtaatataatcaggtatttgaactgatatagtctccattgcatctttgaaaatatcaattacccattgaatacctttaaattcaattgtattaataattaatatcttatataattctaatttatcaaattgattattcatatctaatattgcctcttgtaaaattttcaaacatctcatctttgatccatatttcatttcccaattagaataaataatataattttttttcaaattctttaaatctttctcttcattaaaataatcaattccattctcaaatatttctctaactctttccttatcccattctaaatattgccaaaattttaaaattttatttaaataaatctcataaataattgttttagattgtccattgaaaatcttcatacctctttcataaactccaaaacatctttcatattgttcattttcctccaaataaagtgaataattaataagcataacaccattaacaattttcaatgaaattgcttgttcatatgcatcacatacttgttcaaatttataatctttattattttcaattaaatctaaatataaactccaaagtctaacacttttgaatattttcatttgaacacttaaatttttatcatcgggatcaactctaccttgaagaatttgtggtggtatttcaattgaatgtttagagacagttgttgcatgttttaaatcttccttacctgtattcttttcagaaaattcaagttcaatcataacccaattaatccaaatatcttctaattgttcaatttctgtccatggaacatttgttgcaatctcaagtattttacgacagttacttatatcattattatcataatatactttagcataatctatccaaagtttagataattcatttctttcattatatggaactttattaacaataattttaacaattgcatctgaataacatgcaagaatttcattaacatttgcacgtctttctttcattatttcaattctatcaaaccaaacaccaggtatgttaggattttgtgctaatttgacatcatttaataataataatctattagataataaagattcaaatttgtccaaaaactttacaagttttggattggttttaaattcatcctcatcagtgacggaaacaagcttttcttccaatactccagttaatgaatcaaataataatgtaaaatctttaatagatttactttgtttcatcatcgactctaatatctctatacttttatcaaattgatcgatattgataagatatttagaatatcgtatagtaaattgactttgttgatctttaaactttttaacgatatcattaaaccatttctgcactctcttttggaaattcccatcacttttatatttactaactgctaaatctattattttatcaaaatattttttgtaaatttctaattctgaatctgtacagtgtaataaatatgtaggagtaatcaatgatttgaaaaatgtttcaaaaatatctagttgttcaacagtttcaatatattcaagtaatctattgaatgttttattcaaatcaggtattctatcattttcttgaatttcttccacatttatatgaaatttataacaattttgtaaatatttagcataattgaagtaaagtgtaaacatcaattcagttgtaacattttccatcttcactatatgatagagtattattgcccatagtttaatatgatcttctcttttcaaattactcaatgctttcctgaaaatggagagtaaaaatttataagatattgacattttaaattccacaattaaaatgaaaaacttactccaataatctacatcccttataatattatatttatcagttgattcaattaatgataatattttattaaattcagattcaatttgttcattactcgttgatttttcaataaatgatttaatagtttttttataataatcaataaatttattccaatattcgattccttggaattctacaaactgtcgataacataatgataataatgattgtttcaatattcgtataagttcaatatcattatttgatccagttgttgcttcaagtaattgttgatgtttatgatcgatataattattccataaatttacatcatttggacttttcaaaagttccatttcaaagggtatatcagattcatcaatcccgctcaatatcccctcatcattgttcatattgagtgattaataaaggaaatttcaatgatcaaatacagtaaagattcatgctttaaggtaagataactaaggataatgaaaaaaaaattatcttaagtaatacaaaatgcacagtcccatcgacgcttaatgttaattttgcagcactaaaatttggctgcatgaatttaaactcagtcttttatcagaggaagggtatatctatgttgattagtatctaggagtagaactattcatcaatgtccggggctgctaataggtatgtgttaattggaagattatatagagattgattatttttttctgtatacactgtcttatcaattctttattgatttatttattttcttttatagataagaaatagaatagaatagaagtagaatagaatactaacttttcatataatatagagaacaagttttcccaacacgtatgacacttggtgttatgaaggggaaattaaagggagcacaagacaggtcattcattattaaagagaaaatctgaggctttaacaaaaagatttagagatataactaaaagaattgatgatgcaaagagaaaaatgggtagagtaatgcaaacagctgcattttcattagctgaagtttcatatgcaactggtggtaatataggatttcaagttcaagaaagtattagtaataatgcaagatttaaagttaaggcaagacaagaaaatgtttcaggtgtttatttaccacaatttgaagctgatattaatgaatcaattaatgattttaaaatgactggtttaggtagaggtggtcaacaagttcaaagagctagagaagtttatagtaaagcagttgaaactttagttgatttagcttcattacaaactgctttcgttattttagatgatgttattaaagttacaaatagaagagttaatgcaattgaacatgttattattccaagaacagaaaatactatatcttatattaattcagaattagatgaattagatagagaagaattttatagattaaagaaagttcaagaaaagaaacaaattgcagttgcagcagctgatgctgaagctaaagctaaaaaattaaaagctgaaaaggaaagattagaagctttagaattaaagaaagctcaattagaggctgcaaaggaaaatggtgaagatgtaaaggaacaaataaaggaaacagaagaagctaaagcagctgttgttgaagaatctgtagtggaagaagaaaaggaagaagaagaagaacaatcaggagatttagttgcacaaactgaagatgatgttattttctaatctctctagcttataatatcatatatattactgtataatatacataataataccgtttataattgagcaaatcgtagtataaagttgtagagctagggtcaaaatattcgaacatgcgaattttgatgatatttctaaacctcaaatacttttcatgttggtgaagttgtatttctttgtatgacaaagctaatgtcattacttaaacccattctaacattttggggtcttctaatagcttttataatatgtatttatacatcagattattcaaaattgttaactactataccattagatacttatgaatatccgaaaacatttcatccagatataatttatccaatattggataatttatcaattgatgcaatcaaattagatttgaaaatgttaattaatgatttaccacctgatagatactataaatcagataatggattgaaatctgcaatttattttcaaaattacttacaaaatttaaaagataatattaaatccgatacattacgtgaattaatagaaattgaaacatttaaacatgaatggaaacaaccaagtattttatttaagttaaataacagtaaagaaaatagaaatgaaaacaaacaaactgtgattattggatgtcatattgattcaataaatttacaattttcaaataaagatgcaccaggtgttgatgataatttatcaggtattgtagttattcttgaaaccattaaaaatataattaattatttagaaaaagaagagaaaaatcatttagagaattcaattgagtttcatttttattcagctgaagaaattggatcagttggatcaactgaaattttcaaacaatatagggaagaaaataaacaaattatagcaatgtttcaacaagatatgacagggtatacagaaaagacatttgaatcaggtgaagttgaacattttggattaatcaaagattatgcatctgattcaatgctctcatttacaaaacttattattgagaattactgttctattacatatttagagactgaatgtggaaaaatatgttcagatcatatatcaggtttaatgtacggatattctagtgtttatgcattagagagtaaattagaatatagtaatccatacatacattcaattaatgatactattgaacatattgattttaatcatataatggaacatattaaattaacaatttcattagctatagaattaacaattaccaagtcaaccatggtaactgattctaaaatttctgataaggtcatgttcagatatatcgattttatgatactattaatgatgcatcatactaaagtatttatttacagtgtcatacttttcgcatgtgtcatagcatcaatatacaatttgtatcttgattacaggaaatcattaagagataatgatggtaataaccaagttaatgaaattgaactccccacagaagttgaaagagatggtcatgagataaataaacgcagtggtcctttccccaagggtaaaaacagaaagaacctctaataacagataagataagataagaaaatgacggtctctctctgtggggaaaattaatttttttgacacattttaccccttaactaatgaccatgcccccctgttttggatctataaatgtagagtatctccccccaattgttatctatttgatgttgtctctactttaactttgtttcttttaaacaacaaaaaaaatttaacaatgctatttgatactatgagacataatttaatgaagcaaccaatatctgctccaacaattgcgattggttttatgggtggtgtggttttaccaatattactaactaatgcaattgcaacaaatcatccaaattcaatttatcaaggtaaaacaaaaggtgagttaaattcaattcattataatttagaaaatttaaataaacgaataactaacattcataaccaaattgatcatatagatattgatgaagattatgacttcaatgatattctcttttgatcactgttttggccccatacccccatattattaattaatacagataataatgataataattacaacactttaacgacaagtccagtagttttcaattactgaaatttatttattactagcattcaatacgatatttctttcaaacactatatgaggatatggagtttcattgtttatcttatactttaattttttaattttattttaccttattttcatttcttttactttttcctttcttccttgcttcgattaacaaatttttacatgatgtatataatttttataatttttcattaatttaaaagtttattcatcaagaaagtattaattattaataagttataaaagaaatatacagagtaaaaaagttaaattatttaatgagcagttggttcaacatttggtaattcaactaatgcttttctaattgaatcaacaccctttaataaatcttcctttgatatcactaaaggtggagctaatctaataatatgatcatgagttggttttgctaaaacaccaaattttttcattaataaacataaatcccaagctgatctaccattagttttagtattatcaacaacaattgcacataataaacctaaacctctaacttctttaattataccatttgattcatttgctaatttctttaattcttcttggaaaaaatgacctaattcatttgatctatcaactaatttttcatctttaacaacttctaatgcttcaattgcaactcttgaagctaatgcattaccaccataagttgaaccatgagatccaggttctaaaactgacataatttcctttgatgataaaactgctgaaactggtaaaacaccaccagaaattgctttacctaataaaaccatatcaggtttattatctcttgaaaggtaatgttcccaacataacattttaccagttcttgcaataccagtttgaatttcatctgcaattaataaaacattatatgctttacataatgctttaactttttcaaaataatccattggtggaacaacaatacctgcttcaccttgaattggttcaattaaaattgctgcaattttatcacctgcattcttaaatgctaattcaacatcttcaattttaccatatcttaaaacttgattttcagtacctggaataattggtccaacattttttaaataaggaccaaaattagtctttgcatcaggatcagttgacatagagacaattgcaattgatctaccatggaaattatcttcacatgataaaatgattgcttcatcaggattaatgccttttttaacataaccccatcttcttgcaatttttaaagcagtttcaacagcttctgcacctgtattcattggtaaaacattttcataaccgaaaaattcagtaatatattttgcatatgaaccgaaaatatcacatgagaaagctcttgatgataaagttaatttttgagcttgatcaattaatgcattaataattcttggatgacaatgaccttgattaacagctgaataagctgaaaggaaatctaaatattcatttccttcaggatcccaaacatgtgcaccttttgccttatgaaaaacaactggtaatggatgataattatgagctgcatactcttcttcatattgagttgcttttgctgatgataagttatattctgcgacaggaagggacattcttagttttttgtgattactttgatagaaatattcaagaaaacaagagaaatgaatctacatgtaagagcaattatgatgatgaaaaaggggggatttcaagttgtttaaatagatgaaaatagatgaaaatagatgaaagtaattaaataattaaacaaaaatttgaagaaacagtgtattaattcacctatatttatttgacagctatggttgaagagtcgccaattcctgtgcatagcgatttactatgttgaaattcatgtttttttgagccacccgcttatcttcctctgtcggttgaagttactgtaaagggaaggttttgtaggatttttttctattttttcttttctttgatggaaatggaaggttttagcgagtctattttgaaatttacctattttggctatccatgattatcttagagttatttaaagctgtgtaaaattatacatattatttataacaaattatttaaacatattaaaattaaaaggaataaggtaaagctatttgaattcaacactatgaattgaattacttccttcattatcagaattattaatctcatattgtgtggcattaacttcaatatcatgtttctcaagttctctaacataagtagaactttcatcagttgaatcatcactaccttcaatattttcaatgaaaaattcattattatcaacatgtctcttacctgcaatttttgggaaatattttaaatcatatttttctaaccataatccagctaaaaatactaaatgtgaacatccaattaaaacaaaattaataatataacctttcttaaatcttggtgcatctttaacattatattgtaatggaattgcaaatgcattaactgcatatgataatgcttgaacccaacttaaaactaatgcttttttctcaacattatccttacataatgttgcaatccatgtataataaacttgtgctaatccatctctaaatggtctctctaagaaaaatgctgaaattaaaacattatttggtacattccaaataactaatataatacatgcataataagtaattaacataactgaattaacaggtaaaaattttccataatactgacaaattggtgcaaccattattgcacatggtataccaacaacatacatataagaatcccatgttgtaaccattgaagttgtatataaatcaggtcttgatttcatatataattttggtccattactataccatgattgatgatgtaaaacccaaattgctgaaccaaaataaacttgccatgttgaaattgtttcctttagtgtaccccaagtaaatctttttggaaatgcaattttattctctaatctctttctagcaaatatcatatcatcttcactgaaaaatgcaaaacttttacatgctgatggaatacctgggaataagaaaaaaccataaaggaaaataccaaatgtaataactgcatcaatgataaattgccatctccaaccagctaatcccataactccatttaaactttctcttgcacgagtttgcaatgcacctgaactagcattacctgcaactgcaaatgcaccatatacaccagctcttttaaataattcctcctcagtaagataacttgataaaataacataagttgcaggaaatgaacatgcctcaaagactcccaacaaaaaatctaattgcatacatttgtccagcactagtaacataagcattagctaaagtcatcataccccatgctaattcacagaataataataaatgtctagaaaaatgaggtttagtgatcaacaaggtaattggaatttgaaataatgcataaccaacggtataacaagtattaaaataattcaattcattaccatgaagatttaaatcagtttttcaaaccggaaacataagctgaaccaacatttgcattatccaaatactttgtataaaacgaagcacctaagaaaaataaaacaaaagcatcaaacttcataagaaatttacgttcataaggactataatgttttggataccaatcaaaagcttttaaaacattatatttatcatattttgaaacttttgctgctcttctatccctatcaattgttggatcattatattcttttttaaaagattcagggtgatcaattttgaaataaggccaaacgtaattttttatggcagctaccgacatctttagtttaaatatttattgactattagaggtgtgagttataaatgagtaataactattaaagtttttcaatcatacctagaaaatggtagctatttatatatcattttccacatacaggaaaacttttccaaatgtataaaatcaccctgtaacatgaataaataaacgtttcattccatagaatccgttcaaagtaatagataagaaaactgtggtgttaatccaacaaaaatacaatacgattactatttaatataatagagaattataacgtgcttaatcatgttcttcccatggggtgaattcccggtacaggcacggaaagctgctctgccacactttcactgtcggcgtttcttgcttttaacgatcttttttctttcttttttcagattgtcccttatttaccacaatagtggctcaatctttttcagattttatcaaagtgcgccctgtaattgtcggagattttggtaatttgatatatctgatagcagttgatcattagtataaatgattcaatccctatttaagtatcaagttaactgttttaaaacacgtaattaattacaaaaataaagtatataacgttttgaaatgtatcaaaaaagaagggtttattcccatttctttaatggtaatcctaaagcctctctttgagattttgattccggatcaaaatatggcttttcagctaatgatgtgactctagtaccatgtcttggactctttccttcatgatcccaaacatttctagtgttgagaaactctgttatcccaagatagcagatgtaccagtagcctggactttgtattagtccatttaaatctaacttgaatatcctgcatttttttcataaatgtcaaataagaaagtttaaaattaaatcactttcaattggagagacaccaagaatacgtttagtcatacctctattaacaaataatgatttccaaccagttgctggatgagtacgaatgattggatgaattctttcaactcttttagtcccacctaatggatcttttctatcaagataactatgtgctgaaatataaactgcttccttaccatctaaaaatttcttaaaattatcacttaatttatcataagctgcatatccggatgcccacatagtgtcaccaccagtttccgggattgtatctaaatgtaaatgagtataaccagctggttgtctttcatgaactaaatcactatgccatgcattgttacctaatggtaaatgcctaacactatcccaattgctcatattaatattactgtaatttaaatccaatcctttttgaatcttataatcattccaaatgacagttgcacctggtaatcctgtaacgtgtggtacctgaggatgtttttcaacattgccaagataatcacctaaatcccattgtgcttgaggagatagtttttgatctctgaaaaatacaacaactctttcagcaacaagtaatgctaattcgtccttttgttgatttgttaaatcctctaattgtaacccgacaatttcagtaccaactttatcagttaaattaatcacttccttagctgcaccaaataaagcttttttctccggatctgcatgtttagctctatcatcaaatgaaacatcataatctctaatagcgtaagcttggtcaacaaaaactggaatatcattcctatcaggaacttcagggtacccctttgataaatcaattccaccatcttctaatctttttctacttgcttcaggtaataattttgcaccatcatgatctgcaccatgttttaattttagatttgcatcacgatgccttgtaatatttaattctctatgagttctaattaaattttcaattgtttggtcaattggtgtatcatcaacaacaatcagttttttggactcaattttaggttttgaagtagattttgtagcagtagtcatcaatggttgattatcgtttacaatttaaaaaagaattattcaaaatgtgcttttccaatttatatggttagatcaaataaaaagttaatcacactggtcagtaattactgttattaataatgttcattttccaatataattgacatcagataaattactaacttatataagagttatagccacagtttagccacatatgattcccgttattatatctagtacagtatcagcagctttattatacaatgatatgttttaattaagtgtatttacgtgtttagttacatgatttgctatagaaaagtttatgattttccagcatcccatttctttaatggtaatccaagagcctctctttgcgattttgattctggatcaaaatatggaacttcagctaatgaagtgactctagtaccgtgtcttggactcttaccttcatgatcccaaacatttctgtgttgagaaactctgctatcccagatagcagatgtaccgtagcctggcttggtattagtccacttaaatcttacttgaatatctgcattcttttcacatacatcgaataaaaagttaagaaccatgtcactttcaattggggaaagacctaagatacgagttgtcataactctgttaactgctaaatatttccaaccagtagctgggtgtgttctaactaatggatgaattctttcaactttttttggaccacctaatggatcttttctatttaaatatgaatgagctgagacatagacagcctttttaccatctaaaaatttcttaaattcatcacttaatttatcatatgctgcataatttgaaatccacattgtatcaccaccagtttctggaattgcatctaaatgtaagtgagtgtaaccagcaggttgtctttcatgaactaaatcagtatgccagacattattaccgatagctggatgtcttacactatcccaattaccaaaattaatattattgaaatttaaatctaaaccttgcttaattttataatcattccaaataacagtagcaccaggtaaaccagttacatgtggtgcttgtggatgaacttcaatattaccataataatcacctaaatcccattgagcttgaggtggtaatttttgatctctaaagaaaacaacgactctttcagcaattaataatgctaattcatctctttgttgatcagtaagctcagataattgtaaaccaacaatttcagtaccaactttatcagttaaatgaataacttccttagctgcaccaaataatgcctttttttcaggatcagcttgagaacctctatcaacaaatggaacatcgtaatctctaatagcgtaagcttgatctacaaaaactggaatttcatctctgtttggtaattctggatacccctttgataaatcaactccaccatcttctaatctttttctacttgcttcaggtaataattttgcaccatcatgatctgcaccttgtttcaattttaaattctcactacgttgtcttgtaatgtttaattctctatgagttctaattaaatgttcaatttgttgatcaattggaatatcatcaacaatttttaaatttgcttgtttgacatctgatggtgccgaggatgaagtttgtgtctcagtagttgttgccattttttactacttttcaagattcaatcaaattcacttaacaaacaaaccaaagggtatatttggaacttcctccccatttatattactgtgtgtttcaacattccgctgatcattaagtttagtaatagtcactatataaatcatgccagaaaataaataagtcactaaccttaaaccggaattagccacagtttgccacaaaattttgagattcggagatctgattataaattgacggaaaatgctatccaccggtggtggctctattattttcaatatggtatgttaattatagttgaatattgtggtatataaaatgttgtggaaattgaatcaaataagggatgatataaataaaaactgaagaccctccacgcaattattcatttgactggttggttttaaagtttatattgatttaaaattatttcgtgtatttaaacaattatttcaaataactaacaacttattatgacagttggaaatgcaaataaatttaatatcaagtctattgcagtaattggtgctggtccatcaggtattgcatcacttcatgaacttacaagagtaactaagagtggtgaatcattatttgggctcgatgacgtaagcaaatatgaaaaaaatggtgaacttgcatttgataaagtggtagcatttgaaaggaattcaacagttggtggtgtgtggtgtaagagtgcatttgcggaaaataatgttgatccaaatttacctaagatttatcaaaaaacttctgatgaattggataaattagatttttcaaatccaactgaaacttatcaaaaaactccaattgatgaagagttagagaagaaattagattcttcaagttttgaaaaaccagtttctattccagtaaacaaggaattagaaactattattaataatcaatggagatcctctgcggcatataatcatttgtttacaaatgttacaaatagatacatgattttttcctttaatgatatagttggtcaagaacttgatgatttaaatcataaatatgaacatttactgaacttacaatctgcaagagatgtctctgactatcttgaaaaaactgcagaaaagaaagatttgaaaaaatatataagatttaatactaatgtagagagagtaaagaaattagataatggaaaatgggaagttatcgtaagttatgaatcgaagaatgaaaatggtgagaaattcattaactggtataaagaatattttgatgctgttatcattggtaatggtaaaacaggttccaattattccaaaaataaagaatttattcaaatttgctgaagttaataaggataaagttattattaaacttgctaaatcaattcaagatactgaatttctaggaaatgctaaaaaaccattatttattggatcatcagtttcaagtgttgatttgattcaatactgttatccaagagatttagagaatccttcaatttacatttctagaagatcaccaacatctccacataattggattacgtttgcaacatattcaaagggtattgttaataaacctgaaattgctgaatttttaccagaaactaattcagttaaatttattgatggtacagttgaatccgattttgatgcaattgttatttgtactggttatcataaatattatccattccttgatcaatcatttatagaaaagcataaggaagaagcaattaacttttacaaatatacattttcaattggtgatccaacattagctttggttggtaatgaatatgcaggatttttcttcaatagggttgaatcacaagctgcagcattagcaggtgtttggaataatacatcatttttaccaccaaaggaagaacaaattgaaaccaataagaatcgcccatcattaagtagtggattaattaatccaaatttcataactccattaatagagcttgcaccaaagggtagaccacatccatttgttattaataaagagaagagtgatcatgttgcacatagtgcacaaggtaattttgtgatacaggatgtattctttaaagttagagatggtaaacttgatccatttaaaattgtctaattatactttaacttgtctacactacaattatatagttttcatattcatttaataaacatctactttccacaactacagaatcttagcatttgtaagaacatcggatataaaatgaaaattaccgaatatcataactgcatgatctcccacatttcgccaataccccaagaatgatcatgatacgttgatactgtggtgactctcaataaaacttactgataagaagcacgttacacactttcagagtcacaattgtgtgaataatcaacaattcagttaattgactcaattaataatataaaaagccacagtttctattgtgatggctcaacctttgtttaggttctctggtgtatatcccattgtaaaagtggttttaaacttgattaaaatctatatcttcttccaagaattgtaatacagttttttacaggttacttattgtatatcattaacacaccaagacaatgtttcacctaaaaagagggttattaaggaatacaaaaaatattctcaatgtctacgtcaaaagactcaactcatcgacatcgacttcgtcatcaacattgaaaacttcaattccatcaaatggtagtggtttaggtaaacaatcaattctttttgtatcaggtatactagcaggaggttcattagtttattatcaattgaaaaataatccttctgagacaacattcccaaattcttcaactactaaattaaaggattgtgatgagttaaaatatggggatgctaaggaagcaatttttgaacttaagaaacaattaggtgaatctaaagttacaaatacaaaatttgaaattgaacatcatagtgatagttcatgggcaactgatcatgcaagacctgatgaatatccattagctattgtttatccagaatcaactgaagaagtttccaaagctttgaaaatttgtcatgatttaaaagttccagttgttccatttactggtggtacatcattagagggacattttatttcaactagaactggtatttgtattgatttatctaaaatgaataaaattattgaattacataaggaagatttagatattgttgttcaacctgcggttggatgggaatcattaagagattatttaagtgattataatttactttttggtccagatccaggtcctggtgcttgtattggcggtatggttgcaacttcatgttcaggtacaaatgctgcaagatatggtacaatgagagaaaacgttgtttcagttacagttgttttacctgatggtacaattgttaaaactaaacgtagaccaagaaaatcatcagctggttataatctaacaaatttatttattggtagtgaaggtacacttggtattgttactgaagttacactaaaattgaatattaaaccaaaatttgaaaatgttgcacttataccatttaataatttagcaggtgcagctaaatctgttgctgatattattcaagaaggtattcaattaaatgcaattgaattacttgatgataaaatgatgcattttgttaatcattcaaatcaaactgaagttaaatatgaggaattaccaactttattacttaaaattggtggtacttctcctgaagcaactggtacattaaccaaatctgttcaagatattgttaaaaagaatggatcaacaggcttcaactttgcatcaagtgaagaagaaaaatttgaactttggaatgctagaaaagttgcattatggtcaactattcaatatggtaaagatacaattgataaagatattcaagtttggagtactgatgttgcagttccaatttctaaatttgttgaatcattagaggcaacaaaggaagaaattgaaaagtctggtcttgtatcatcaattgttggtcatgcaggtgatggtaattatcatgcaataattttgttcaaggaaagtgaacgtaaaattgcatctcaacttgttgaaaatatggttcaacgtgcattaaaattagatggtacagtgagtggtgaacatggaattggtgttggtaaaaaggaattccttattgatgaagttggacaagatgctgttgatttaatgagaaagattaaatttgcaattgatccacataaaattcttaaccctgataaagtttttgcaattgatccagttaatgatagaactatatagagaaaagtacttatttattaatttagaacattatagtattagaaaataactgtaaaattagtatatatacgaaatagaatgaatacactaagctcatagaaacttatacgatatattacgtaaaatgaatccctatatagcgtattatcctatcctgagtaaatttctatcaaagaagacaactgatcttttctctactaagagtttctgaatatttaaagtattctaaagtaaactaaataataataatataaatggtacaaaaataaatatttcattccgaatctcttctagaaacaacatgttccacaacatcatctgatttaatttccctataaggaatactttcaacggaatcagaatcaattgcataagtatcagcttcaattaatatacctgaatcattaagatgtctcttacctgcaatcttaggacaaactttcatatcatatctttctaagaaccaaattaaaaggaaaactacatgagaaccagcaattaaaccaatattaattctataacctttcttaaatctaggtgcttctctaacatcatattgtaatgggatagaaaatgcatttattccatatgatagtgcttgaatccaactcaaaacaattgcctttttttcaacattatccctacataaagttgcaacccaagtataataaacttgtgcaagacctgatagaaatggttgttctaagaaaaatgctgcaattaatacattatttggtacattccaaataattaaaacaatacatgaaaaatatgctgttatcataactatatgcattggaataactttaccataatattgacataatggtgaaatgaaaattgcacatggtataccaatacaatacatataggaatcccatgttgtcacttgttcaacagtatataattctggttttgtttgcatataaagttttgcaccatttgcataccaaccaatatgatgtaagacccataatgctgatgcaagataaacttgccaagtagtgacagtttccttaagtgatgcccaagtaaattgttttggaattgcaactttattctccagtctctttcttgcaaaaatcatatcatcttcactgaaaactgtaaaattcttacatgatgatggaatacctgggaataagaagaaaccataaaggaaaataccaaatgtaataactccatcaatgataaattgccatctccaaccagctaatcccataacaccgttcaaacttttcctagcttgtgattgtaatgcacctgcacttgcactaccagcagttgcaaatgcaccatatacaccagctcttttgaataattcctcctcagtgagataacttgataaaataacataagtacaaggaaatgaacatgcttcgaaaacaccaacaaaaaatctaattgcatacatttgtccagcactagtaacataggcattagctaaagtcatcataccccatgctaattcacagaataatagcaaatgtctagagaaatgaggtttagtgatcaacaaggtgattggaatttgaaataatgcataaccaacggtataacaagtattaaaataattcaattcattaccatgaagattcaaatcagtttttaaaccggaaacataagctgaaccaacattagaattatccaaatactttgtataaaatgatgcacagaggaagaataaaatagttgcatcgaatttcatgagaaacttacgttcataatggactataatgttttggataccaatcaaatgctttaaggaagttatacttatcatattttgaagtcttctttgctcttctatccctatcaattgttggatcattatattcatttttaaaagattcagggtgatcaattttgaaaaaatgccaaatagtttgtgaaactttactttctttccaactcatgtttggtttggtttggtttggtttggtttcttaactcaaataagaatatgttttctgatcagttagatgtctttttatactcattataccaatgtggttattcaaataaatgaactatggcaataaaatgtggtatccatttcatacatagatcaacgtttacgagccaccactatttttacaaaatcaactgaaaaatttatcattactaatattaatctgcgatgagttaccacccttttttttctgatgatcttcaaatgccgccacggtaaggctttacggataagaaaagataaggaaatttaaattaatacacaccaatagtgatatacttggcaaactgtggtttaaacgagaaaataggttaattttagatattttgttaaattgttaagttaaataaataagttataaaaaaagttaattaaataaattaaaagttaatttaggcatcccatttcttcaatggcaaacctaaagtctctctttgagattttgattccggatcaaaatatggactttcagctaatgaagtaactctagtaccgtgtcttggactctttaccttcatgatcccaaacatttcatgtgttgagaaactctgttatcccagatagcagatgtaccgtagcctgactttgtattagtccatttaaatctaacttgaatatctgcatttttttcataaatgtcaaacaagaagtttaaaattaaatcactttcaattggagagacaccaagaatacgtttagtcatacctctattaacaaataaaaatttccaaccagttgctggatgagttctaactaatggatgaactctttcaactttttttggacctcctaatggatcttttctatcaaggtaagcatcagcagaaacatagattgctttcttaccatctaaaaatttcttaaattcatcacttaatttatcataagctgcataacctgaagaccaaatagtatcacctccaacacctggaattgaatctaaatgtaaatgagtataacctgcaggttgtctttcatgaactaaatctgtatgccaaccttgattaccatagccctaaatatctaacactatcccaatttgcaaaatttgcattgttaaaattaagatctaatcctttacttaaaccataatcaacccaaataacagttgcacctggtaatcctgtaacatgaggaacttgtggatgtttttcaacgttaccataataatcaccaagctcgtattgtgcctttggtgataatttttgatctctaaagaaaacaacaactctttcagcaattaataatgctaattcatccttttgttgatctgttaaatcctctaattgtaaaccaacaatttcagtaccaaccttatcagttaaatgaataacttccttagctgcaccgaataatgcctttcttttcaggatcatgcttgagaacctctatcaacaaatggaacatcataatctctaatggcatgtgcttcatcaacgaaaattggaatttcatccctatttggtacctctgggtaaccttttgataaatcaatgccaccatcttcaagtctctttctacttgattcaggtaataattttaaaccatcttgttcatcattaacaattgattttcttgatcttgaaatacttaaatctttatgatttctaattaattgttcaatttgtttatcaattggtaaatcattaacaatatccaatgattgtttattaactgtttcagtattactcatagtgtttgtttagatagagaaattcaaaagagaatatccagtagtggatttatctggatatttatatagcaaaatgttggattattaatacaatttatctacacaaatgtttgactatccacagttgaagccacactggaaatttcaaacatttcacagaatcgtaagattataaaggtgttatacacaacaagatagtatttcaaaaactaaagtcctcacagagagcgatcttaatatatagacaccaacagttgctttgtcatgcatgatgatagataacttccatacagagcaagcccaaacttcggagttgccagtagaattgactttaaggaacgagatgagacgcaactttttctttaatttccagtaagcaccgccaccaagcggctgatgtctatgtaagtttattatttctctttataattgacatccaatttgaacgataaactatataaagttcaacaattgataagaaattaacacctaatgctaaacctatccataatccataaacttgtaaattaaaatggaaacctaataagatttccaatggaacaccaataatataataagataaaattgataaaattgaaccaatttgttgtctaccttgaccacgtaaaattgctgcacaaagtatattaaaacaatctaagaattgattaattgcaattataattgctaattttgatacaatttctaaaattttttcatcatttgtaaataaagaagctaatttaattcttaataagaaaaaccaagtaaaattaaaaattgataatgaaatcattaaaatatagatagctttcattgcaggtttataattagatgatcttgcaccaattaaattagcaatatgagttgaacaacaaatacctattgcataaggaggttgaaatgctaatgaagctaaagttgaaacaatactttgagcagctaattgatccttagagaatgtagttgacatgaaagtaataacttgaaatgctaatgcttcagataaaatcattaaaatacctggtaatcctaatttaaagaaaatgaaagatgatgaaatatatgatttaaaatgttttgattttaaatattcaaatgatggtaaacattgatatccatcaataaaatacatataaaagactaaacaaatagtcattatccaataagtaattgcaaatgagattgcaggaatttggattggttcaattatagatgaattatttgaaataaatgagaaaacatttggatttttcgataaatataaatttaatgagaatgaaattggtataccaattataacaatacgagtgggtattgaaaatttacattgagattgtaaaaatcttttagttgattcgaaaataacaattgcaggtgtaataaatgagaaagttttcaaaaatgaatgacataatttagctaattcaatattatcatcaatattatttgaatttgaatttgataatgatgtaatatatctaaagaaagaataagaattaaaccaaaataaacatgaaggtatcagacaaattaacaatatgattgtacattgaatataataaagaccaactttatgataatgtcttgccccataagcagttgaacaaagagtatctaaagcagaagcaaaaccattaacaataactggaccagttaaataaaaagttgtaattgataaagtacaagccgataattctattgaacctaatttacttgcaaaataagttggtattaaaatttgaattaaatattgaatgaaaaaagttaaaaaaactgggaaagcatttttaattaaataatataattcatgataagttgaagatgaaactggatgtaaagggaaataagaatcaattaaatcatttgtttcttcattattattattattattatcaatatcagattctctaatatcagtaaatcttgtatttgaacaatctgtaggtaataaaggttgtaattcaggatcaacttgagacattatttcacttaaaggagttggttcaggagatacttcttttaactgtgccaagggtacaatcatatcatgtatacgaaattaagaattgataaaaaatagattagaatacaatagaatttccaaaaaaattaaattacagtatcaaatcattatccatccattatacagtaaagtctgacataattaatagtcattttaaaacttacgtaatcaaaagataaaacattatcattacgtaaagcagaagccacacaataacaattacgtaataagataaaaaagcggcagataaacagaatattaaaataaacaataggaactagtaatcagtggcttatacggagcggtgagtaaataaataaaatagtaaaataacaataaaatgaataataaaataaaataaaataacttccgctccgctcttctcttctcccttctctaataataataatagacacaacgaggctgaaagtaaaactagccttatcgtttaaagggttccttagcttaacttaatgctatagagattctcgtataggttatttttatcacttttctattgttttattattgttactattattatattatgataaccatcagcgtatagttaattcactgtagatgataataatagtaagttcccttaggtaagtaaccttaggtatttactagtagatgtaacattggattttgtatctagattagtactgttactaaaattttacaccaatacagtaatttcttatttataatcaatcaatcaattattaaaccttatttccatttctttttcctatattaaaactaccataaaatggaaataagaaatgtttaattcagtcaataatggagttaggtgatagttggggttaaaaccgtcaaaatcgcggatttgctttttttgttttccttttttttatttattccgctgtatttctattatttcgtaaaattggttaaaaggtggaccaggtcccacatttttaataattttttttaaagttttgaaattatattattattattattattcattctctttaaataactaattatggagtcaatatctgttggtaaaggctctgatgaagcttcctctggaggaattgcttcttatactggttttgatgaaacaactgataaacagattagaaatttagcaagagaatttacaagatcaagtattgttaatgataatgataattcaaatgaagatactatgaattctaatgatgatgaaaaattatctggtgttgataacttagatttcgaacaaaatctaaatgatcaacatgattcaagatttcaattattacgtacaatgacttcaatgtctcaaattcctggtgttgttccagtatctgataattcaattaatcctaaattagatccaaatagtgatgactttgattctaaattttgggttaaaaatatgagaaaaatcttagataatgatccagaatattataaaccaacttcattaggttttgcttgtaaaaatttaattgcaaaaggtatctcatctgatgctgattatcaatctaatttcttaaatttcccttttaaaattgcaagagatttatatatggatcatgttagaggtaatgatcaatcaagatattttgaaattttaaaatcaatggatgtcttaattaaacctggtactttaactgttgttttaggtagacctggtgctggttgttcaactttcttaaaaactgttgctgctcaaacttatggttttaaagttgatgaatcttcaactattagttatgatggtttaactcctcaagaaattcaaaaacattatcgtggtgaagttgttttctccgctgaaatggataatcatttccctcatttaactgtcggtgaaactttaaactttactgctcgtatgagaacccctgaaaatagattccctggtatcagtagaacagaatatgctgatcatatggcaaaagtatgtatttaaaaatttaattacaaatcaattttttttttcaaattttaaaaagcattatactaacatttatttcttaatttttttcattataggtttatatggcaacttatggtttatcacataccgttaatactaaagttggtaatgattatattagaggtgtctctggtggtgaaagaaagagagtttctattgctgaagcttcactttgtggtgctaatatcgaatgttgggataatgcaactagaggtttagatgctgcaactgcattagaattcgttagagctttaagaacttctgctcatgtcttagaatcaactccattaattgcaatttatcaatgttctcaagatgcttatgatttatttgataatgttgttgtcttatatcaaggtcatcaaatttattttggtcctggtaataaggcaaaagcattctttgaaaatatgggttatgaatgtccagatcgtcaaacaactgctgatttcttaacttctgttacttcaccagctgaaagaattgcaaagaaaggtttggaagataaagttccaaaaactcctcaagaatttgaaacttattggaaaaattcacctgaatacaaacaattaatcaatgatattgatgattatttagaaaaaacatcaagtaataatacaaaggaaatttatgctgaagctcataaaactaaacaagctaaacattcaagaccttcttcttcattccgtgtctcttatggtatgcaaattaaattaatctctttaagaaattattggagagttaagggtgatccttcagttatgatgttctcagttattgctaatattattatgggtttgattatttcatcattattctataatttggaatcaaatactgctactttctattaccgttctgctgctatgtttttcgccgttttattcaatgctttctcatcattattggaagttatgtcattatttgaagctagaccaattgttgaaaaacataaaaaatttgcactttatcacccttcagctgatgcactttcgtcaattttaactgaaattcctgcaaaattatgtacatgtcttggtttcaacttaatttattattttatggttaattttagaagagaacctggtagatttttcttctatttattaatgaatttcttagcaactttggttatgtcacatattttccgttcaattggttcatgtttctcaacattatcagaatctatgcctcctgcaactattttcttaactgctatggttatttataccggttttgctttacctgttccttcaatgcatggttggtcaagatggattaattatttagatcctgtggcatatatttttgaatctttaatgacaaatgaatttgatggtagaacttttgaatgttcacaatttattcctggttatccagatgttggtatcgaaaataaagtttgtaatgcggtttctgcagttcctggtatgagttatgttaatggtactgattatattttatcatcatatggttataaaaatactcataaatggagaaattttggtattacaattggttttacacttttcttcctcgcagtttatttattccttgttgaaattaataaaggtgcaatgcaaaagggtgaaattattttattccaacaatcaactttaagaaaaatgaagaaagagaaaaatgttgcatcagttactgatattgaaaatggtgattcaaaagaaaaacctgcaggtgtctatgatcatggtaatgaagaaactattggtgatggtgttaataatttagcagcaggtgatgatattttccattggagagatgtttgttatgaaattcaaattaaggatgaaactagacgtattttaaatcatgttgatggttgggttaaaccaggtactttaactgcattaatgggtgcatctggtgcaggtaaaactactttattagatgttttagcaaatcgtgttactatgggtgttgtttcaggttcaatgtttgttaatggtagattaagagatcaatcatttcaaagatcaactggttatgttcaacaacaagatttacatttacaaacttcaactgttagagaagctttaagattttcagcttatttaagacaaccaagatctgttgcaaagcaagaaaaggatgaatatgttgaaaatattattgatattttagaaatgcgtccatatgctgatgcaattgttggtgttgcaggtgaaggtttaaatgttgaacaacgtaaaagattaacaattggtgttgaattagctgcaaaaccaaaattattattattcttagatgaaccaacttctggtttagattctcaaactgcttggtcaatttgtcaattaatgcgtaaacttgcagatcatggtcaagcaattttatgtacaattcatcaaccatcagcaattttattaaaagaatttgatagattattattccttgcaaaaggtggtcgtacagtttattttggtgatttaggtgaaaattgtaatacattaattaattattttgaatctcatggttcagaaaaatgtccacctgatgcaaatccagcagagtggatgttacatgttattggtgcagctccaggttctcatgcaaatcaagattatcatgaagtttggatggcatctgatgaaagaagagcagttaatgaagaactagaggaaatggaagttggaattattgaaaaaatcagttgatgaatcagaagaagcaaagagaagttttgcatcaacttattataatcaatatatctatgttacaaaacgtgttttacaacaatattggagaactccaaaatacatttggtcaaaaattgtatttagcagttgcaaattctattttcaatggtttttcattctttaaggcgggcacttcattacaaggtttacaaaatcaaatgttgtcaacttttatgttatctgttatgttaaatactttagttcaacaaatgttaccattatatattacacaacgttcaatttatgaagttagagaaagaccttcaaaaactttctcatggtgggttttcctttcagcaattttcactgctgaaattccatggaatattctttgtggtacattatcatatttctgttggtattatccaattgggttttatacaaatgcagaatatacagatacagttcatgaaagaggtgcattaacatggttattaattgttggattctttaattatgcatcatcattaggtttagcttgtgttgcaggtgttgaagaagaacaaaatggtgcaaatatttccaatttattatttactatgtgtttgaatttctgtggtattttgaaatatccaaccggtttctggtcatttatgtatcgtgcaaatcctttcacttactggattgccttcaatattatctgcaggtgttggtgatagtaaattagtttgttcaccaaaggaaattgtttatttcagaccaccatcaggtatgtcatgtacagaatatgttacaccttatatgaatgaaacaggtggttatatggttgatagtgcagatcctgaatattgtgggtattgtacagcaagtaatacaaatgcatatttagaatctgttcatgttaagtatcataaacgttggagagattggggtattttcatttgtttcattgctattaatataatgtttatgtatgcattatattggttagcaagagttccaaagaagaataatcgtgttaaggatgcatctgctttaaagagtgaagataaaaaacttgaaactcaagctactgaatctagaacaatcgaacaagtttaaactaaaatcttttctttgataccatttttttaaaaaaacactatatgaagtattccgattgatactatcatttaatcatccattcccttgaatttttaatacaaatttgttagtaatctttttttttacataatttttttataatctaaataacttaatatcattactataatataatctataaaaaaagataatttttcagttaaactttacacgtttaacattttcattctcaacgggttctggagttgattcatctttcaattcaataccattagtcaaattaacaaatttattccaaacatggttaattttatcaatatcatacaagtttttattattattcataattttccaaatttctaaataacctaatttagcaatataattaattaaaggattattatttgatttaattgaattatttgccaaaaatgcatatttacaagctgatgtaaaataactaacttttttattaagattatttaattctttcagacctgcatcatatttatatgaataacccttgattaaataaataagtgatgtaagaaatggagttatctgtgaaattttatcaattgataaattcttgatgaattcagttgatgattttgaacttgtatagaaaaaatttattgttgatattgttgattttatcaataattcatttaattgatcatcattaaatgttcctatattagggatgttttcttctaatttaaataagtcttgaaataacgagtcttttagtttaagtaatgatttaaaccttttcatcgatttatcataggatacatcgaattctgataattcattatttttcaatttttcaagttctataatatgtgataataatggaattgtattcaatgtagtaataaggtataattgttgattatttattaaagagtgaaaatttttgttgaatggattaactaatcctattttattctggattgtgaattgctgaaatgtttttgtatcatcaattgtattattaagaaaatttgttcttatttgaatatagtattttaaagatttatagtgttcaccatttctttgataaatcattgcaaatatcaagtatagtaagggtattatgttattgtatattataatttcataatctgagtatttaccagtactatagcttttccataaatttgctgatttctttatatctttcattttttaacagttgttcaatagtggggtaatcatctttgataatatcagagaagagttggtaaacgtataaaagtattcttgtatagttagttcttacaatttgagtttctgaactgaaaattgtggaggagttatatgatgaagatacagatacatcatttaatagattgtttcgttaaagtgaatagtttatcacttttatttttattatcccaatgatttataagagtaacatattgataagtaaaagtatgaaatcatgttgaattctttaaatgtgagccaattcaattcgaaggggaatgctagattgtgtttaactgtgaaattgaaagataattttgatgatgtccacaggagtttattgtttttagaattggaattgttaagtttgatgtttttgataaatttcgataaattttgtgcaatttcattgactttattaaatttatagtgtttaatatttattataatttcaaataatataatcattgctttgagttgtaatgaaatagttgaagatttattggaatgactatcttgtaatgattgaattttggttaatgtttttagtaaggtttctaaagattcattgttgagtaactgttgagataaaatattcactagtattaattgattgaaatatgttaattctgacagtgaaggggtggaagatggggttgagttttctattatagtttctaattgtaaatgtattgaattaagatcattgaagtttttctcaaatagatacaaaacattgaagttttggaatttaatgaattggaaaaataagtttaatgcacgtgaatgaatcatctgtaggtatttcatctttgataatcttattcaataatgatagaagagacagtgtgtagaagttgtagatatattattatttaagatttgaaaattaagatagttcaattttagtttagttattgttaattcaggtatattttccatttcttttacatatttgaataccttttgaacaataatccaatgctaaatcataagctaaaagtttcattaaataatatagttgaaatcttgtaataaataattgcttgtatgtttgcatctaagacaaatagataatcagatgctagcttgaataaacagttaagagatgccttgaatgagtgaattgtatatgtctaattgtttacccgtaaggcaaagaacgcgttttagtattaagagaatgtgcttgtctaagatagtcattactgtattttaaaagataccaaacttctttatcagaagaaagttttccaccttggtccatcttcagtgtcccgggaaaagttctttagtttaatttaacacacgttaataagaaacacgtataaatataagttaccataagcagtaattcccagaaatagcggttgaagtaattttcatgccggcaaacgcgacaaaacaggtgtcgtgggggaatagactcagctgcgccgttccgcgtcgttccgcttaaatagcgagggctgagctgtataaattttttttaacaagtggcaaattgggtggcaaaagttgtgaaaattctgtttttcgtgcaactataaaaggaagcgggttcgccccttttttgcagactgcgaattctggcgatttccagtattgtgattgattactttaaatttttcataatatttggaaggctcagctgttattgtttcgtttacaacttttttcactacttttttcttttccgtaaatcgttatttggcatcccaatactatcgaaggactcatttgcttgaacgtctttctgaaatactcttacaaactcatacttacataccattacacatattacacatataaataatggattcgcttaaattaccaacaacggctgcccgtgcaaaggttttcatgggagaaggttcattatctttcccaacttcatctgctgctccaatagataatagtaatataaagagtaataatgatatcactaataatgatataaataatcttaataataataataataataataataataataataataataataataataataacagcaatgctgatttgaaatctataaaacaagaaattgatttaaattcaaattcaaattttaatactactaaaattccagataataatttatcatcaataaattctaaaccttgaaaatattgataataaaaataatattaatactgataataaagaaattactgaggctaatggtaatacagataatgataatttatcagcatcaggtattgtaccaacattacaaaatattgtcgctacagttaatttagattgtagacttgaattgaaaacaattgcattacatgcacgtaatgcagaatataatcctaaacgttttgctgcagttattatgagaattagagaaccaaagacaactgcattaattttcgcatcaggtaaaatggttgttacaggtgcaaaatctgaggatgattcaaaattagctgctagaaaatatgctagaattattcaaaaattaggatttaatgcaaaatttactgattttaaaattcaaaatattgtcggttcttgtgatgttaaattcccaattagacttgaaggtttagcttatgctcatggtactttctcattcttatgaaccagaattattcccaggtttaatttatagaatggttaaaccgaaaattgtccttttaattttcgtttcaggtaaaattcgttttaactggtgcaaagcaaagagaagaaatttataaagcatttgaagcaatatatcccgtcttgagtgaattcaggaaaaattagtttcattggtgatatattttcatctccattatatttcctcttttctttcttatcttgtcttctcttatcttcctatctctatttctattgtcacatattccattccattactctagttgtacattatctaccattatatttcctatataagagctgtattataataaataaaaaataaaaaataaaataaaataaaaatgaaaatgaaaaacatcccataacaaaaggaggtctcgaacataaaaaaaaaattttatttttcatttttctcaatgggcttggatgatcccctataattattatttattatagtgattcaccccccttcccacaacgccactcttgtaaaagattgtcttgcaatcagcacgcaattcttcttacacgtttataatataactagttttaatctattatttatcgtcttataggatcttaaatgactactgcatcatctcaagataaaagtcacttaagtactgttaaagttggaggttcaattctcattgatagacaatctgcatctgcatctccatcaccagttccaaatcaacaaaatatgaataataataataatagtggtgaagttttacgtccaatctataagaaaactccatcttctaattcaaattcaagtaaactgtcacaattacctcaacttgaaactcatataaaatataatggtggtgatgtttataccaataatattaggtcaaattcaaataattcattattacaaaatgataaaaaaattattaatgttaatgaatctttattaaataaggtaacatcagaaagttctcagactgtattaattggtaaaaataatgtttatcataataatggtaatcctaatcttgtttcaactccaacaagtattttaactcctcaccccaaatctgtgccagttccagcatctatactagcatcacatggtggatcacataatgaatccgtatattccgttaatgatactcataatcaacaacaacgagattattttctgaatcataataatgatgggaatttagaaaattcaaatttacaaacaccaattcaacaacatgcaccccctgcaactccaattactgtaactccaggtttaaaatcttcttcaagtttaatatcgtttcaagtgactaatcaaaaacatagaggttcaatatctgtaaggcccgcttctaaggtaataccgggtacaggtgcaggatcaactaataataattcaacattgacttccacaccaataacttcatcagtaactacacctgtgacatcaatgggaaatcatttttctggattggccattgacaatttacaaacaggtataccaagttcaagacaaccatcattatctactacaaatccagttttaccttctaatttaaattttgcatcgcctccattatcaagacatggatcaactagtgtatcgaatgattctgtaagtactccaagaaacaattcaaatggattttcagctcattcaaataattcaccaaataatccgttatcatttacaattgatccaacaactggacataagatatcatcaccagtatattcagctgctaatatatcaagaaaggaaaatgttaaatcaccaaatcattttgatttaaatggtaataattcacttaatccaactataaatcatataattcatcatcatgataatttaattacaccaattacgcagacagtttcaggatatccattaaatagcataatgttcccagatttaccatcaactagtagtactaggaaaccttccttaacaattgaacataatgaaattaaaagtggtgtatcatcaaatggatcaactagtgaattaattactacaactactcctaatactttaaataaaaagaaaatacccaaaacagtagttgcaccatcaagtgaaccattattaccatttactgagtatttatgtaaagaggatgatgataaaattcatatattaattggagctacaggatcagttgctacaattaaaattccattaataattgataaactattcaaaatttatggtaatgataaagtatcaattcaattagttgttactagagcagcagaacattttcttagaggtttaaagataaacagtgaagtaaaaatttggagagaggaagaggaatggtcatcaaatttacataagattaaaccaggagatccaattttacatgttgaattacgtaaatgggcagatattttattaattgcaccattaagtgcaaatacattagcaaaagttgccaatggaattgcagataatttattaacaacaattgttagaatttggaatccatcagttaaaattttagttgcacctgcaatgaatacatttatgtatagtcatccaatgactaaaattcatcttaatataattaatgaagatttaaaatttattgaagttttaaaacctgttgaaaaagttttagtttgtggtgatattggtatgggaggtatgagagaatggagtgaagttgttgatattacagtcaagagattaaaagagattaagaagaagaaattagaggatgaaaggattaaaatggaagctgaaaaggctgaagaggaagttgatgaagatgaagatgaagatgaggaggatgaagatgacgatgaagatgatgaaaacgacgatgatgactatgatgatgacgatgacgacgaggatgacgatgaagatgacgacgaggatgaagaagatgatgaaaataacaataataatgataatgaacaaccattagtgtaatattaacccatttatagatcgatttatgtaataagcgtttgtaataaaatgatgacatgaaattttgatccgatggaaaatctgaacagttcttcatcacattacttgtttcttatatccaatgggattgaaagtacgtagtgtagtgtatgcattggcgacatatactatttacactacatatagttatgcaagagctagagaggagataagtttccgagagaaagagtatagtaaacgagaaattgatgatgaagatcatagatgggatatattaaacattcatggaaggtatgagaatccatttaaagaatatagaccacagacaatttatgaatttttcataatgagagttattgaattgagtaaatttggatcaaggggtggtgttgaagatgatgttaccataaggaaggataatttaggtataaaagttaccgatagtagtattaatttttggaaatcattacgtgataaatgtaaagaaagtggattattagcatatacatggtttggacagagttgtggaattgtcaatagtagtgataaaatatttttaatggatccattgtttgaaaatagtatagttagtgaaaagttcggtccaaagagaattgtaccgtgtgttgttaatattgatgagatagttgaagatataaaaccggattacgtgttagtgagtcatgatcatccagatcatcttggtgaggggagtattagaggattatcaaaattagaaaaatgtgaatggattgtacctatgggtattagagatattttagagaataatggtattaaaagtgataaaattattgaaatgaaatggtgggataggaataagttaaatgaagaatttgaaattgtttgtttacctgcaatgcattggtctggtagaatgttatatgattcaaataaatcattatggtgtagtttcttaattttgaaaaatggtaaatcaattttctatcatggaggtgatacaggttatagtgaaggagtatttaagaggattggtgatatttatggtccaattaaatttgcagcattaccaattggacaatattgtcctgaatggcatcaagcacctagacatattagtccaagtgagagtattaaaattatgaatgagatgaaaatacataaaatggttggagttcattgggggacatttgtattaagttcagaagattatcttgaacctggacaattattaaagaaagaaagtgaaaatttggggaaaaattaataatataattgtacctgtacagggtaagagtttaattatggaagagggtaagattgattttaataatgatgatttagtaaaagagacaggaaatgattttattttatacaattaggttattaggtctattttaaatacatgtttgagctaatttttggaatttttcaaattcttcatcattcattggataagtatgagttgaagaatttgggaaatttaaatttttaacatcattaccataattatttaaagcatcaattgaaaggtcatgaatatttaaataagggttaacaaattttggtaatttattatctaacatacctaaagcatctgacataactaaaacttgaccacttgttttattaccagcacctataccaattgttggtatatttaaattttctgttatataatgagataatttttcaggtatacattctaaaacgattaatttacaaccaatttcttgtaaatgtaatgcttgtttaaaaatttccaaagcttgaattgaatttctaccttgagctttgaaacccaccagttaggttaaatttttgaggttgtaaaccaatatgacctgtaactggtataccaaaattatttaaagttttaattctatcagttaattcatatgaaccttctaatttaattgaaccaattttacctaatttcattaatttaattgcagaatcaatacattgattaattgaagattcaaatgaaccaaatggtaaatcaacaattaaaaatttttcattaattgatctaataactgatttagttgaataataaaaatcatcaaattctaattctaaagttgaaggatgaccttttgcaaccattgctaatgaatcaccaactaaaattgcatcaattttagatgatttatcagcaattttaccagttatataatcatgagctgtaattacagttattggagttttatttttatataatttataaatatcagataatgatgattgacgtttaggtggatgagttgaatattttcttattattgatcttattattgtcattatttattaaaagagatgtgatttaggagataaataaaatttatattcatgttggggtaaaataaaaaaaaattgacgtgacaaaatatacgacaattaatcatgtcgtatagtatcgtatattaataggagtgtactttactttaattgatgagttataagaatatataaataaataaataattaaggagatgatgatactaacataaagggaattataatttaccctttaattcttctctagcatatcttgcaccacaataaccacaagtatgaaccttttctttatctaaattaatataaacttttggatgaccctgtacgaaatcagttccatgacaaacagctatattaccatgaataaatgaaattggttgatttttaattaattcaattgcagctaaagcttgaggttgctttgataaatctttaccaacaaatcttggatcagttttatagatttcatctcttgatctttgagatggagaccatacaccatctctatttggagcttgtttataattagaggatggaataacatcaagtggatcttcagttgttaaatctgttgtagttgatgtggtagttgatgtagtggttgcagtcttagtagcagttgcaacattacgtttagagattgcccaaaggggagactttacaccaataactgatcttaacattgtatgcagtagataaggatatagagatgatgatataaatgaatacacaaataaatacaaaccaaccaatagacagtttctattatcaattacttaatattgatgtattaatattaatattaatattaatacttagctaagagaacctcccctcaatggaagaaattttctattttatcgacgtatagtctcatagacccatcgacccatcgaccactactcgacgcacagacgcaggctcagctaaaatggaggatcaaatctgatattcggtttactcgttccgtaaccattgaatggactgaatctttcattaggattgtttctcttatgtctttcctctggatggaataatggatcatcaatagttggatgcatacctcctctgccaatacctggatataaatcaccatctccaaatggcataaatcctttaccacccccattatcacctcttctatttaatgagcctccaatttcatattcatcatcaaatcctggcattggatcacctccaaaattattaaatgatgatgatactagtattagtattatcttcattattattaatcctttctcttttaatattataaaattctcctttaattaaatcaattaaacttcttaattgaattatcctcttattttgataactttctgcgactcgtcgttcgagggcttggctgattgatttactaattgttagggggaaattaacattacttatatcaattaatgatgtatcaataatagttaatgatgaattaattgatttactaattaaatcttcaattgatgtataagttgtagtcattatttattgaatgtaaataaaaacggatggcaaaagagagatattttgaaaaagaaagtgatcaactaagaaaaacggaatttttgataaaacatgtcattccatatatactataagtattttttttgtatttcttgtagtataataggtaagtatttgtaagtattgataattatatcgatatattgatataatataacatagtataatataatgacaactgctgtaccattaatatattcattccctgaattctctggagttgcagaagctgttgcagatttaattgtaactgctcaaaataaagcattaaataaatctcatgatgacattaataataataataataataataataatagtacaacaaatttacaagattctacatcaataataatatcagataatgaaattgatcatatggattcaatttcaatgtcaaattcacaatctgtttcatctcaaataaggaaaaaagaagaaagaatctaataaaaggtttaaaataagtatatctggtggttcattacttaatgttttaaatgaaggtttacttaatagagatgatattaaatgggataaatgggatatttattttgctgatgaaagattagtaccattcgattcaattgattcaaattttggtcaagcaaaattaaaattatttgataaaatacctgataaatttggtaaaccaaatatttatccaattaatcaatctttattaaatgatccacaggaatgtgcatgatgattatgagaaaactttaattaaaggttttgcatcaaaagattcagttaaattaccaatgtttgaccttatattattaggttgtgcacctgatggtcatgttgcttcacttattcccaaatcatgaaactttaagagaaaattatgcttggtgtgtaccagttgaaaatgctccttcaggtcaaaaaaatcgtatatctttatcagtacctgttatttgtcatgctcatatggttgcattcgttgttgaaggtacaactaaagctcctgtactttgtacaattatggaaagacctgataaaggtttacctgcaagtataattaatgaaaaggcagctggtagaattgcttggttcgttgatgatgatgcaatctctgatgttgtaggtattacaaagaaaagatataaatttactgctcaatcaaatcgaaattgatttataatataatgtcctttatgtgtatatcttacttacatacttatctataccgttgcatggtatatctatctgatagttatattatttatataccacttaattaataataataataataataataataacaataataataataataataataataataataataataataataataataataatacacgcttaattgtataatttttttctaacccataataaaccattaactacacacttcttttctttagttatatctacaataccaaccatgtattcaataacaccattattattgacatgttcatcaattactttcataatatcatttataattttatacaaattaactaatttaaaatcaatttcattaccattgacattaactttattaatttcattatttttaccagttaagtacaactttcttaattccaattgatatttcatcacctaataatagtcaattaatgtcaattttatggaaattaaattattggattacattttttgcaacttggttaattttaccattttggcaatattttctaagtaatggtcaattcgaattattaccaaaaattaaatcatcaatttattcagttttcaaatttttattaatactgattataattggtaattgccattttcatttatatgttattttatcatattgaatatattaattttacattcttaaaatctttagttataacattatctcatatttatgcattaacaatggcaatttggttaatgattcatggtttgattcatttacctaaaagttcttatttaaaatcatcatattctaaaactttagataattcatatttgaaaattagagattatcaattaaaacttgaagattcaaaatttgaattaaaagatatttgtataaagattaattcattacatgatttaattaataattcaaattttaatataaatttagatattcaattacgtgatggtataatttatatgtttaatcatatacctgaaaatttcaaattaattaataacaatattaataataatcaacaatttcttattgattcaattggtatatcaattgataaaattacattaaattttattacaaaattaaatgaagatttaaaatggaaaatttgggaatataatcattcaaattctcaatttaatgaacaattaaaggaaattttatattatgaagatattatcaattatattaatttatcaaattttgaaagtgaatggagaaattttaattataaatggccaaaatttatgtttcaatatgtatggccattatattatttgataattacatttttatttacgttaattagtttaataattattgaaagtgaaatgtttcatggaactaaattatcaatacttaattggattataaatttaaattctaaattctcatatattttaatggttatatttttaattataatgatgtcatgttcaatgaaaagtttaagtttaattaagttattcaatatttataaagttgaatttaattcaaattcagatcctgttagttcaattttctttattagttatgcacttagattaacaattccattaggttataatttcttaatgttattaaatcctcaaatttcagaaaattcatcattctcattattcgttactggtaatttacatctaattaaaattggtgaaattttaaataatgtaataccaagattagttttaatacctgtattattaagtgtatttggtatttgggggaaattaagaaaatggttagatggttaccttttctttgattatattttggatgaaattgaattatatgaagaaaatgaaacaattgatacaaatttaagattaattaatgaaggtaaattaattgcacaatcaagttttcaaagaaatttaataccattaaatgatacaacaatgccaaatttttcatttaatcaatcatcaaattttagtatttggaattatttaccattttcacttttcaaaaatagaaccaataataatggttttaatatcgatgatgatgatgatgataataatattatgaatggattaagagaatataatttaattaatgaaaatggtatattattagagagtagaagaaatagttcaaatagtgatggtggtagttcatatagtggagtttcaggtaattatgatattgataatagagttatgggtgatgaatttattagaaatattcgtgagtagtttaaaattgttgttatatgtgataccctgtagattttttatattttgttatgtatttatgtataataagtatgtgattgaaagttattgaagtgattgtattgttgattttttacttattttttaaaaaatgttaaaaaactttgaatttttgaccatattttttaatttttacaaatcattggtaataatcagaatgagggtgttttaacaaattattaaattgccataacttgcaatttctaataaattttctaataaattttaaaaattttaaaaatcacgtgacccaataacaaaaccacaggactaacaaacaggtttaaaaaacaactgaatggggctatggctcaatggtagagctttcgactccaaatcgaaaggttgcaggttcgattcctgttggccttaattcaaaatattttttatcaccctattaaaaatttaagagaggttaatatttattttactactattacggagattgtggaatttttattattattttactccagattactttttgaattgattgtaaactatatccacaaagcaattgattatcaagatagcaacccgaaaatagtcattgatataacttagactattatacattcattcattttatttagttaatagacatacagacaagtagacatagactattgtcgtatagatcagcatatgatgatgaagatgaaaataaaattaaatacaaaccttatatgtaaaaggtcaatatcacaatatttaacgattcatgcaatgaaattgaaatctccaattaattttcatgttgatttacttaaagtaccgtcaaattttggttattatacaagtagagttaatagaatgtataatgaagatcgatggcaaacatcaatattaaatttgaaacctgatgaattgattaataaaaaaagtacattaaataatgataaattaattgaagaaacaaatagggttaaagaaccaaaatatacagcaaattcaccaccaattgatagaacaatttttgcatttggagttttcgatggtcatggtggtgatgaatgttcaagttatttgaaaaatcatttgtatgaaaatattgaaaatttatgtattaatgaagatactatattaaaattaaaagatttttataaattgaaaatcagtggttattggaaacgatgggggaggagaattggtgatgttatggttagtgaatgtaaaattgagaataaagttaaattatttattgatgaagttaatgaaaaacacggtatagtgaagaaagtagataatacagtagaatagatcatgatcatgatcatgatgatgataatgaaaatgaaatggatgaaaaatttattgaatgggatgattttagtaatggtaaaaaattatggttagtacttaatatgatgataaatgaaaaaaaactgacacattgggaaatttttaaaatcaggatatggctaggatatttatttacagattatcaatttttaacatttgaaaatgcacaaaatgaattaagattaagtaagaataaaagtaaagatattgaagatatcaagagaaaaataattcatagtggtagtacatgtacatcatttttcacatatccacttaaatggaaaaatgataataataatagatatttttatcaagataatgtattatcaagattagttgttgcacatgttggagatacacgtgcaattatttgtgataaagatggattagctcacagtttaacaaaagatcatcatccatcaaatcctattgaatcaagtagattaagaaaattaagtgcaggattaattatgacagattcgtttggtgaagaaagatttttaaattttgcaaatacaagatcatttggtgatatcagtgctaaaaatgttggaattacaagtgaacctgaaatcagtgaatatttaattggtaatagtacaatgatcgaagaatttaaaaatgatgaaaataattttgaaattataaataataatgaaattaaagattttggaggtgatgaaggatttattgtattaattagtgatggaattacaaataatttatcagatcaagaaattgttgatttaattatgatgaattttaataataaaggtaataacaagggtaatccaatgaatggatcaagggaagttgttgaatttgttcaatgtattaatggtgatgataatgcaacatgtttagtaattagattaaatggatggggtaaatggccaattaatgatcgtacaggtaaattaagagaggaaagaatgatggatgcaggatataaatcttttgataggtaaccaaataagagatattatattgtgattgttattttatttttatgtacagatttaatatacaggtacttttttatttatttttgtaatagacttttataatatataccagagaaaatgaatgaaacgaaatgaagtgaacttacaagaattccactatttattcttagtttgagtataagaccatctttttctagtatgagcaaactcaccaagttttgaacctaccatattttcagtaatttgaacttgaacataatctctaccattatgaatttggaactttaaaccgacaaattgtggtaaaattgtacaagatcttgcattggttctaattggagtaccatcctttttagcttgtgcaataggaagaggaacaacaaatggacctttccaagaggatctacctaatgatacaagtgaagctctcattgtcttcaagaagaaatgaagtttcttaatgcataataattcatcgattcaatgttcatgtagttgaagaaattgtaaatttttcaaagagtgggaaaaaaagaccgacgcaccgaccgcgacatgataacttatcgataatatccttattattaagggattaagtgtttaaagggtatatatttcttttatgcattgttatgatatagtagtgcacgatgtttcatttagcacaatcattatatgatcaatggacacgtcaagaggaatattctgtattaattttaggattagataatgcaggtaaaactacattacttgaagaattaaagagtaaatatttaaataattattctaaattaccatcatcaaggataataccaacagttggacaaaatgtttcaacaattcaaattggtaaaattaaattaaaattttgggatattggaggtcaagatgcattaagggatatgtgggatgaatattatttacaatgtcatgcaattttatttttaattgattcatgtgataaagatagattaaatgaatgtagtgaaactttgaaaaatgttatatctgatgataaaactgaaggtttaccaattttaatgttagcaaataaacaagatttacaaattgaaactaaaatggatgttgcagaaattaaggaagttttcaataaaattgcagttaatttaaatgcaagtgattcaactgtacgacctattagtgcaattactggtgaaggtgttgatgaagcaattgattggataaaggatagagttatacttaataaaagtaatagacctccaatattacgtaagtgagtgaattttttatattaataatattaatagtgtaattgtataaggtataataatgaataaaccgatatgttctttcttttggggtataatgttttcacgtataataagggtaccgttattgaaacagtttggtagtagaagtttatttattcaaacattaacaacacctaatgaaaatgcattaagatttgtaccaaatggagcaacaattttaccaagtcaaaaaactccaacagttgaaattaataatattaaggaagcaattcataaaagtgaacttgcaatgaaattattatcattaaatgataaagcaatatcatcaattttatttggatatgattttataacagttgttaaatattcagaggataatgaagttaaaaataaggctgattcagttaaaccacaatcatggtcagttttaaaacctcaaatttttgcattattaactgaacatttaacaatgggtggtagtgtattatcaccagaatatttccaacatttacaaaaaatagataatgaagaaattgtaatgaatgaaaataatgaaaatgatgatgaatttgataaagatttaacacctgaggaagaagttgttttattaattaaagaattattaacaactagaattcaacctgcaattcaagaagatggaggtgatattaaatttattaaatttgatcatgaacaggggattgtttatcttaaattaattggtgcatgtaaatcatgttcaagtagtgaaattacattaaaatcaggtattgaagatatgttaaaatattatattgatgaagtaaaatctgttcaacaagtattagatggagatgctaatgatattgataacgttaatgaagatgttataattgaagaaaaaaaatcatttattaaacatacagttgatgaattaccaccaagtttataataatctttatataaaacgtgtaaatagtgatatgaatacatttttttaataataataatgacttaatacgagctagtatacaaatccataaaaataatgaaagatgaatataaatagaaagaaaaagagagagtatgaaaaaggaaagatattaataaaatacagattgataataaaacagtgataatgataataataataattgaagatataatacaacaagattatattttcttaaattctatttctttgcctttgcctttgatttgttagctttagttgacttagcagttgattttgctttagtagctttagtagctttagaaggtgcctttgattttgcacttgcagttgtctttgcctttgcctttgttggagttttagtagttgcctttgatttggttgatttagcctttgaaggagcggcagcctttgctttctttggagctttagttgaagcctttgcttttgatgtagttgctttctttgcagtagtttcctttttagtagttgaggaagcagattttttaacaggttttgatactttagtaattttagttgatgatttctttgttgaaggttttttatcagcttttttagaatttaaagatttttcctttttcattactaattttaaagcatctttattaattttaacaggacctacaggaccttttggttgaataaataaatctgagattacacctttccttaaagctaaattaaatgcagattcaaaaccattatttaaattataatttgattgaatgaattttttaattgattgacgagatgaaccatttctttcctttaaagtaatgattgctttaacaatcatatctttataacttaatttatttgatgtatttgtagttgacatttgttaattgatgagttaataaataattataatttttttttaaaaaaaataattgaaattaattaaataaatcaaaacaaatgaaaacaaaagaaaaagaatatgaaacaagtggaaataaaagtcaaaattgaaagaagtaaacaacatttggaaaaatgatgataaaaatgataaaaatgtaatgtaaacaatgcaatctcttaattaattaaaccccgtatattaaaatgagaataaagaacgcgtttattacgtaaacatttatccgtgtttgcattacgtaatgcgtgtcacgtgcaattacataatcacataatagacgcgtcttttatttcaagcattataatattttaattacttaaaatagataaagtatccatccacccccccccactccccccactctctcataatataatattatgcctactagaggaaatcattaccataaagtttatatccttagatttattattttattaaatctctattgtatatatcacatacgagaacattctatctcgtatcttgtagtgtatatcttgcaacacaaagacaatacaataacatacaatacaatatagtatagtatacggataagtcccgtcgcaggtattataataataattaccacaggaagataagaatctgattggtgggtagctgttcaattaagtttctcttatcgggccgcacatggcctaaaagggtaatattcagaattattggaccgttttctcactattcggcgttctttgacacattttccactatcttcattaaagtataaatcctttatttttcaccagtctttccttttgatttaaattgattcaactttcctactttctcttcttttctatttcaacctctcagggtttctcttttcatttcgtttatttactttaacttcttatcttttatctttcttttcatttcttattatcaacaacaaaaaatttttaattaaaatggtccaaccacaagaacctgaatttcaacaagcttataatgaacttttatcaactttaaaagattcaactcttttctcaaaacatccagaatatgaaaaagttatcccagttgtctctgttcctgaaagaattattcaattcagagttacttgggaagatgataatggtgttatgcaagttaataatggttacagagttcaatttaattctgctttaggtccttataaaggtggtttaagacttcacccttcagttaatttatcaattttaaaattcttaggttatgaacaaatctttaagaatgctttaactggtttaccaatgggtggtggtaaaggtggttcagattttaatccaaagggtagatctgataatgaaattagaagattttgtgttgcattcatgagacaattatcaagatatattggtcaatttactgatgttccagctggtgatattggtaccggtggtagagaaattggttttatgtttggtgcttacaaggcaatgcaaaatcaatgggaaggtgttttaactggtaaaggtttatcatggggtggttcattaattagacctgaagcaactggttatggtgttatttattatgttgaaaaaatgattgaaaaggcaactaatggtaaagaatcattccaaggtaaaagagttgcaatttcaggttctggtaatgttgcacaatatgctgcattaaaggcaattgaattaggtgcaacagttgtttcattatctgattcaaagggtacaattattaatcaaaaaggtatttcaccaaatcaaattttagcaattcaatctgctaaattacaatttaaatcattagaagaaattatttcaacttcagaaacttttacaactaattcaactaaatgtgaatatttaccaggtgcaagaccttggattcatgttggtgcaattgatattgcattaccatgtgcaactcaaaatgaagtttcaggtgatgaagcaaaggcattagttgcagcaggttgtaaatttttagctgaaggttcaaatatgggttcaactcaagaagcaattgatattttcgaagctgaaagaaaatcatcttcaaatattggttcatcaatttggtatgctccaggtaaagcagcaaattgtggtggtgtcgcagtctctggtttagaaatggcacaaaattctcaaagagaaagttggacagctgaagaagttgatggtaaattaaaggatattatgattaattgttttaataattgttatgaaacttcagtctcttattcatctgaatcaaatgataattcattaccatcattagttatgggtgctaatgttgcaggtttcattaaagttgcagatgcaatgaaagatcaaggtgattggtggtaaatcatatataattgattctttaatcctatattataatctttataacattaacattacatgtacaatttaaagtaatgaactaaaaattattattcattacgtaatagcacgtgacagacgcgacgactttatatctttaattttatgattcgtatagatttatacctctttattacgtaataaatgataaattctacaattaaatattaattccgtaacaagttgatgattttgatgattttgatgattttgatggttggatgggttggtattatgttctttttgtttttgctttttagttatatttataacaatcaattatgtctgcagctacttggacatcatttattaaatctattgcttcatataatggtgatttatcttcattaactgcgccaccttttatcctttcatcatcttcattaacagaattttcacaatattggtcagaacatgtagatttattacttgaaccaaattttattacagaagaagatgcaaataaaaagaaagaaccaatagaattattaagaatgttagcagttgttaaatggtttatttcaactttaaaatctcaatattgttcaagaaatgaaactttaggttctgaaaagaaaccacttaatccattccttggagaaattttcgttggtaaatggattgattcatcaaatgatcaaaaattaggtgaaacaatacttttaagtgaacaagttagtcatcatcctccaattactgcttatgcagttgaaaataaaaaaaataatacaattttagaaggttataatggtattcgtgcatcaatgtcaacaactgctttaaatgttaaacaatttggtcatgctttattagaatttagaaatttaaatgaaaattatttaattactttaccacctttacatattgaaggtattttagcatttaatccttatgttgaattagaacaaaaatcttttattcaatcatctgctggttattatgcaataattgaatattctggtaaaggttatttttcaggtaaaaaaaattcttttaaatgtagaattttttcaaattttgaaaattctaaaaagaaggaaaatgcactttatacaatttcaggtcaatggtcagaaaaatcaacaattgcaaaaggtcattcaactccttcatcctcaaaggatgaaatcttctttgatgcatcaattgaaaaacctcaacaattaactgttaaaccaattgatgaacaacatccattggaaagtcaaaaggcatggttagaagttgcaaatgcaattaaagttggtgattatgatttaattcataatgcaaaatcaaaattagaaaataatcaaagagaattacgtaaaaaggaagaagaaaataattcaaaatggaatcgtagatggtttgatgaagttgattataaaatcgatgaaaatttaaataatgaaaatgatattttcataaatttatcaaaaatggcaaatttatcaattaaaaatgtaccttcaggtgttgaagctgatagttcgaaaaataaagaagttgaattaatgtctcattggagattcgtacctgaaaattttgataatgaaaaggaaattaaaatataatttattctatattttaaatttatattttagtgtctttcttatatcatttcatttcatttaattgaatttaaatttatatattataaatttataacattttttttatatagcatatattatatcttgcactaatttcacaacactacaccccttttatctactcttcaaatccataatcaccttcattaaatgcttcatttctaattgattgaatccatggatgttgtaataattcaactgcacttgctctattctctggattaattgttaaacattttttcaagaaatcttgtccctgttcacttaattcattattatttggtaataatggtaaatgacctgcagcaatatgatacataactgcaaattcattatctaaattactccatggtcgtctacctagttgacatttcaagaacacaacaacctaatgaccaaatatccattgctccaaatctacccatgttaccacctttaattgtttcaggtgacatatacattggtgtaccagttaatgcatgtgatttcttactctcacctatattcttcataatactagtattaccattagcactcatacttgctgtcatactaacattattaatcgtattaccaataatactaccacgacgacttctaatctcaccttcttcggtaattccattatatggtgaaattgatgataatgaattagatttaattgatgcatttgcattattattattattattactattactatatccatgatatcttgaattttctcctgtatttatgttacttgaaatactactggttgaactcgatggtacatattctgttggtgttggaatattcaatgatgatgttgaaacattactactattcatcagattagagccactattattactattatttgaatttttatcatcattgctaactgtaccattattacttgctgtaccactaccactatttggaattgcaataacttttgcagatccaaaatcaacaaatttaataactcccatatgatctaataatatattatcaggtttaacatctctatgaacaataccaaattgatgtaaatatgctaatgcttctaacatctgtaatgtatataattgaattacaatttcatcctcaattctaccatattctaataagtttgataatgaaccacctgaacaatactccataaaaatataaactctatcacgatgaacttcaacaccaaaaaattgaacaatgtttggatgtgataataattctaaaactgacatttcacccttaatagctggaacaattgtcttaattgattgtctatcttgaaatttaatttctttaactgccattggtccaccagtatccaaattaacatgaggcgaaaactgatccaaatgtaccacctcccagaaatttacccttttgccaacgaattgaaacacttgaaaatgactgatgctaagtatgacaataattgattctccatattggtatcatctaaaactctaccaactgaactttgttcaacttgtaataatctacgttcttcttcgaattttattaacttgtgacataatgtgttcccttaaactacgtaatgattcatcatcaagcgtaaagatatctttttcaatcttgaaaattataattttgcattctacttttctgtaattctttagctcttgcacccataatatcgaaatgtgaaattaataatgacatacatgctgcaactttttcctttaatctataaaatctttcagcatctaatgttaaaatgttaaaacctcttgtaacatccatagcaaattctaatgcagaaacacaccatctaaaagttttaacatcagatggtgaacaatcatcaacaatgaaacttaaccattctaattgataatttaattaaacttaaaataatagaagttcttgcacttcttgaatcaattaacataaatgtagttctaatagtaatctctaccaacatctcttgcaaacatgaaaaaattattaacctaattcttgacatttaccaatacttctacattgatttctaatagttgactgttgaatcaatagttaatgaagaaattcttgaaaataatttaagtgataaattaaaagtttttagatatacttggtaatgaacaaactaatttagtatttgatccaattgttgaacttgtaaatcttttgaaaacttcaaaaatttcctctgcattatatttatgaccacccattgtcagaaacaaagcttctcctctcatcaatggatctaaatcaactgtagacatctcctcaaatggtacaaccagtaccatcccacatcaatgcctttggaggtacaatggcaataacataatctaataatggttcattgtattcatcattcgtcttcatcttcctcattattaactgtagacaagctagtgtggttagatggattcgttatcagttgattcgttaccaagattagatttttcatgttcatgttggtgttcacctttatttttatgaagttttgctatatgcataatttcaattgatggatgataacttttaataacatctaaatgacgttttggaattttagaaaaattaacacctagatatttactctctaaaatacattgaacatcatatggtctattaactaaagactctgaaacaaaaagataaataccattctctgcaatttttgaattatgatataatgcatgatttgaatcttttaaaagtgaaaaaaagttttgagttttatttggtaaaactttaaatttaacagaattatgatagtattggacctaaatttgtttcaaatctaataaattttctacgtaattgaccaaagttttccattgttgatgtataccaacgaatcaatctttgactatctaatctataaccatctgatggtgggccttgaatttgattttgtaaaaatgcatataatctattaattaatttgataaacaatgatgtcatagatgtggagaatctaagctgaaataccattaatatagaatcccatattttgtaagaagagccattctctctccaactcatcaggttccttgtatgttctgaatgattttgtactctttggagaaaacaataactttttattaactaaaaccatataatattcaacacattcaacaatagtattgtcaaattcaatatcttgataatctggaaatgaaatccatccctcaacaggtgcacaatattcaagcatactgattctaatttcaattgctagtttaaggtatatttttaaatcatccaatgtttgatcgatcatcatcattgttggatttttaacttttttagcatagtctaatctcattttaataatttctttcatcagtttagatgggaaattagttaaaacaaacaaaatatctaaatatgaaggcaaacctaataaattaaaatattgatgatattgtaaataggaagttttagctttaattgtccaatgagagaatgttttaaactaatcttttagtcaaacagattttcaatatccttttctttaagaattttttcaacgaaaaggtctatcatctctgaaaatatgattagtactatttttatgattattattttgatctgaattctgaatcatgaatcatttgaatggtttaaaatatctaaatcatcattaccaacccattgttttaagacattactttcacgttcaactgcttcagtaactgacatccaagcaactaaacaatcaattctatcactgaattcaggtgttgcacattgtggtttatcatttctcatttcacttgatgttctccataagttcttgacatttttcatactttttctaataataatgaaacttttgatgaagcaaatgcaactttatcaatatatgacataccaattccatcatttggtaaaactaatttaaaatttaaaatttcatcaattatatcatcaaccattccacgatgatacaaaactaaacgtctttgttcctcttctgttacgtccatatagtttagcacgtataccaatccaaaaatcttcattatattgaattcttaatagattattattttccatttctgatgtcaaaggtttaactaatttagtcttttcaccagtgacaacatcacctgtaagaacagtttgaagcattgtttgccattctattctttccgaaatagcaggtacgactggcatctgatggattatttaattgagtttcatcatttctatttagtaaatctaataaaacattggaatctaatgagtattccgtaattgtttctaattgtttattacctacttcagaacaaagttgttgacttaaagccttcaactgcctcatattctctatttatatcattggatataaaatcatcagattctaaaattttagaatctaaactatttgttttacttttcaggatatggttataatttgtaccatgaacgcttaaattttgtatattattatctgataatgtcgggtattattgatgatgaaattgaagagatagaatgattatgttgagcattttcggtttcctgtatcattctcggtatctgtttcaacatcatcgggtgcaagcaaacttatcataatagtcatcattgtttaaatatctattcttatacttggtaatacttgctaagtacattttctcttgttgttggtatttttgagaattctttgtgttgaaaattacttttaagaataggaagtttgaggtctgaacaggttcaggcaattgattgtaagattgtttttgtgtctgtttgattttattaaagacttttgctgagtagatgatgatgataatgatgatgattgttgctgatgttgctgttgctgagcattctgttgttgttgttgctgttgtgtattctgctgtgcacttgatgatggtaatctttgtaaaaatgatggagatagtaaaggtctaccagttgatggagaaattggtggtgaagaaatatcgtgaccgggtattttcagcaaatcttttttatcaaatatattatcaatatgagattgttgatgagtttcaaaatttgggaagaaagaatcacttttattatcaggtgaagtagttggagtaccacgaggtgataataaaattggggttgtttgtaaatttgaaattgtaaaaggttgttgtgacagttgaagtttaagtttcatcttttgaggttgtgttgtgtgtaatggtggtgatgaaggtaatgtaccattatcatgaactgatgatatacttggatgtcttgataatttagcacgtaaacttgtagttggagcaatagaaggactcaaacccattgagtctttctgcaccattgattcatcattgtccttcttgtcgttattattcaaagattgttccatatctgttggactggaactcatagttgtagaagatatatttagaaaagagtgtatataatatcagttcgaaagaaaagaaatatactaataatcaatcctcctcggcgttggaaaatgtagaatccctacttatattatattttataatcttacgtaataatttaagtcaattttctcaccaaaaagtgcttttttcaccaaaatcacgacactctttttgttgtgggctcaacaccgtttttacatagtaatttagctgaaattgtgtggcaatatctggattcccacagagcagctacaaacaaaccagtggtacaattggaaagagaaaaaaagttattgtggtcctacagagagacatttcaagatttgattcccaattttctaaaaatcaaaaaaaggtgcctaaaaaaaggaccaaaaaatagtgtggtacacaacatgaaaaacatgtattaatttttgagggagggcgatgggaatatttattgaaaccctgatttggcattttatatagtatagagatatatactagttatatatcaaggaataagagttataactatgacgatagatactgctgaagtgttggacttggatcgatgtttggagaaattatatgctggtacattattatctgaaagagttcttgaaagtttatcatttaaggcgaaggaaattatgattggatataaaaatattgttgaagtttcatcaccaatcacaatagttggtgatattcatggacaattctatgatttacttgaaatatttaaaattggaggttatatacctgatacaaattatttatttttaggtgattatgttgacagaggatatcattcaattgaaacaattagtttattaatagttttaaaaattaaatatccaaatcgaataacattgattagaggtaatcatgaaagtcgacaaattacaacaaattatgggttttatactgaatgtattaccaaatatggtgttgatagtaaagtttggtcaatttttacagatttatttgattttttagttttaagtgcaattattgataataaattattttgtatacatggaggattatcacctaatattcaagatatacaaagtatatcagttattgatagatttaaggaaataccacatgatggagcaatggcagatttaatgtggagtgatccagatgttgaaatacttaattttagaaattcttcaagaggtgcaggttatcaatttggtattaatgttgttaataaatttcttaaattaaatggatttgaaaaaatatatagagctcatcaattatgtaatgatggatatcaaattttttggaaagggtaaagttaatacagtttggtcagctccaaactattgttatagatgtggtaataaagcatcaattttagaaattatgggatcagagagtgataattttagatttaatgttttcgatgcatcacctgatagtgaaaaggaattaattgaaattgaagataataataatgaagaatggaatgaattaaataataatcgttcaatgatcaaaaaggcagcatatgtagagtattttatgtaaattatataatataaataaaggcaaatctatgaatagtataattctaaatttgttccatcattaatttcataatcttgtaatgaaatatgatctttaaaaactgtataacctctctttaatgatatattttgaggttttgaacccatttgaagtgccagtacttgtttaaattcaccaattgtatcttcaggtaaacatttgactataaatttccttcccaaacgatcattacatgttatttcaagcatggttattaaagattgcaacaaaatcagtaatagaaaaagtaccttgtggtataaaaataaatttaatggtgatgaaaaaaaacttattacgtgtgcatgtaaattaacgtttctttattcctctcttttctttcttttcaccaaacaatggacgatagcatcaagagtccgttcaaatttgagtctcagacaacattgggtgttcctggatcaccgggctcccctggtattttaccaaaggccaatcgagctaatcgaaatagtatgaatagtatcaatgctaatttccgtcgaggtcataggtacaaacattcatcagtgtcaatgaatatgtttcaaaatgatatgcctgattttaaaatgacgcctgaagtggcagatataaagcaaaatgtggtgatagaggagaagcaaaatccattgttaattttaattgttgcaattgaaataattattttcggtattacattttattgggggacattagcattatcaattactgcatgttataatctagttactaatgtaatgaatggctggaagaaagaatggtttgcaggtaggaaatataatgttgcatattttgcattagcattatttatgatggcagttgttcatggtggacatccacatggaggacatagtcatgaacatggagatgatcatgcgcatgaaattgattataccaagatgaaaatgacatcattaattgcaataatagtattggtttcagcaatcgtagcatattggattaattcaaataataatgggaagaagaatacaccaggtagtattagcagattatcatcagtaacattatcaccaccggaaaaggttacattagtacagaaagattaagaaattgccaatctcattagtacttcagtataagtgtttccattactagtattattggagaatatttagagatactaaagattgtgccgttgctaatttcagttgttatatttttctatgaagtacttggacaatcgaagcaacttttattaacaggcccattacgtgatagtgatcatttgaatatttgtaatgcaattacaagtcaaagtgtatgggatagtgaattatatatacttgagaaattacatatgatgatgccaacaatgaaatcatgtgtagttgttgcattaatacgtgtacctgaacatacatctaatgatgatgtatcgaaattagtattctatacgggacgactgttaacatcaactgctagatctgttcttaatagaggtgaatttcagtctagttcattagagagacgaggagtgatagattcactgaatggaccatcctctggtgatgtctctatcaccattgatatccagcagaagcaataaattccatcaagatatatacataccattgttgaataagaggtattcgtttattaatgaaaggggcagcgatagtgaaggctcgtttaaacaacggtttctttcatatttgattattataacatacactctttatagatacatatacattacttctaattaactctttatctaatgacaattactcgtcttcttctcattggccctgttattctacttacttttacaacttgtttcatttaccaaacatatttaatcattacagtacctttaatatggatcagaaagagcaatcccgatcccgatcccaaaaacaacagcttccacttagagaagcccttaataataaggggaccaccatcaatggaacaaaactctcactcaatgtctaccatgatgcccttagacacgcagaacgacttgaaaacgtccttgtccaatgggaatcaataaacgttactgaaaacacagggacatgaacccccattacttcttcaccattgtctcctatgatcctaaatgccagtcaactcaaccaaggagttcttcaccttgtacagtgacgatccaacccttgtcaatgtaagtataataaagtaaaggctcagcgaatatgatcaatataataattcaaaggctcagcgaaggctcattcattttcctgaaaagtataaatactaacttattccccccattttcctaatccattccacttatcacaggtttatcttacttttgtcggtttctctacacactgctaccttctattcctacttattatgacatctgcaacatcctctgttttctccctattctgcggtttacttatgattatcactctatcattcctatttatacttactacacctttcttactcgtcgtcggtgcgtcgatgctgactgtcagctgcaatggcattaatgatacagagaactggtgaatcactctatgcaagagtttcatcttctaatgctttacgtcttttacttgtccctattgctgataggatacctccatcaattggtcgtgttgaagttgaaaaatcttaaataagttataaataaataaattaattaaataggttatattatttatataataatggtttctgttgcttttgtatgtcttggtaatatttgtcgttccccaatggctgaagctgtatttaaagaattatcacataatgattctcgtataactaaagttgaatctttcggtactgcgggttatcatattggtgaaactcctgattatagaactattcaagtttgtgaaaaacataatataccaattaatcataatgcaaaacaattaaaatctcaacatttacatcaatttgattatattttatgtatggatgatgctaatttaaggaatgttaaacgtttacaaaatgataaatcaactgctattatacaattattcggtgatgaaattattgatgatccttattatggtggtgttgatggatttgagaaagcttatcaacaatgtgttaaatatactgaaaatttccttaaatctttacctaaataacagttgatgattccttttcatttgatataatacattcaaatccactaaatgctgcatttaaacttctttcataaaattcattaattttaaatcctgatgcaataaattgtatatcttcctctaatttactataaaatggatctctataattatcacttttcttaaatggtaattcaatcattctatcaccattaaatggtgtaaatggtattttactcttattttcattctttatatcatttgcatttaaatttctcttaattgcatccttttgctttctatatttaacctctaatttatctaattgacttcgaaatctattcattttttcaattgtattatttctaattgtttctaaaatttcttctggatctttatcaatagatgcattctgtaattgatcaataatttgaacttttgataaattctttaaattcttttcctcttccattatttcactattaattctatttctctctgatttatattgtctttcaagtttttgtagtttaataaatttctcatattcttgttccttacgtgcattattcaattcaattgattgtttattatcaatagaatattgttttaacttattttctgtttcctcaatatccatcttattaagtaaattgaaaacaatatcttcaatctcttctaaatatttatcatacatttcaattgtttgaaaatcattctctttcttattataaacacttataactctcctacgtatatcacattctttctccacaattaaattttcaaaaacttgtgccttgaacttattacgtctcaaaatcttatcacaattaggatatggacatggtgatggacctagggcaaatattctatcaacacatgcatcacaaattttatggtaacattcagggtttatcttaaattgaatctctggtgataaatacttatctgttttacaaactggacataaatctttaggaacgttatcccaatctaactcaaccatcttatcttatcttttatattgtttgtcaaaagaacttaaaagaaaagacattaataacttgcttactaaaatcgaaaaattgcaaaattgaaaaaaatcatgcacgggaacacgttttaaagttcatgcaatcttcttcttttgaaacaatcactaaccatggatacttatatacgtgacagactgataattgataagaaaccaattacaagttcatttcttgcacaggaacaaaacatttcaatcaaacaagcatctgaatcactcatttcattcattgaaaataataatattgataatattcaactacattattcaataactggttataaatcaaataataaaatacaaatacatataacaactaaggatcaagtagatcaaatatgtaatcaattaaaggatacagtagtaatgttatattcattaagtgagaatggattatcattgactaatattaattcaatgtgtaaagtgaacaagggagtagtacttactaaaacttacgttgaaacaaaacaagagagatcaggcagtgagatcaagtactgcaccacaaccaataaagaaagaagttaagaaagaacctatgaaaaaggaacctgttaaggaaacatcagttaaaaaagttgaagaaactaaacgacctgtctatgtatcaagaaaggcatcaacaattcctgcaccaccagctaagagagctaaaaccgaaagtgataaggaacgtgagagaaaggaaagggagaggaaagagttggaggaaatgttaaaagatgatgtatttagtgatgatgatgaatatggtggtgttgtacaggatattaaggataaagaagttgaaagtaaatacgtttttgatgatattgatgttgcagatgaagagcaaccgaaagaagttacaaaagaaactaaaaaggttgaagaaccacctaaagaacctgttaaaaaattaccacctcctgcagatccaacacctgcagtggaaactttcgttgatgcagatggttatgttgttcgtaagattaacaaaccaaccaaacctgaatcatcatcaaagaaacaaagtaatcttatgtctttctttaaaaagaaatagatatttgtattgaatatcagtattatatagtgagtcttggcatattttttttccaacatgaattattctagttgatcttgaatattttctttctgtaaaacatgtctgaagaaattgaagcaccgccaccacaacctggagcatctttgatgcttgcatggcaagtcaaaggtatgtattgttttataaactaatatcaaatgaacattattaactaaccatttattttaaataatatagaaaaacacgtattagtcgttggggctggtgatgttggactttcaagaattgatcatttacttgcagcaaatgctaaaataactgttataactggtaatgatatacatccacgtattgaatattataataaattaggattacttgaacaattaatttgtcgtgatttccaattaagtgatttaaagttatatgagagtgaaggtataagagaatcagtaatggggaaatgtgatggtgatgattcattagatccattaaatgatgaaattactaaaaatattgaaaaattcgaaaaagaaaaatttaaaatggtactaacatgtgttaataattatccattaagtttaagaatttggtatcaatgtaaaaaattaggtattgatgttaatttagctgataaacctgcatattgtgatttttattttggttccatttatagacaaggtccattacaaattatgattagtacaaatggtaattcaccaaggttatgtaatagaattaaaaataaaatgttagctccattatttgatgatttagatttaaataaagcagttcaaaatttatcatatttaagatcaaaattaaggaatgagattcatcctggtgataaaactcaaattattaaggaaagaatggaatggaataaaaaaataactgatcattatacaattaaggaatggacaaaagtttgaattatcatcaattgataaaattgtttcattttatccaaattttccaaaaattggtgatttagtagagtagatgaatgggatttgttaataaacatttttatagtgatattagagatatatacttatataaaaaagaacttgtcatatacagaagttgtgttttgaaaaagaatactaaaaaagaactaaaaaaaagacgacaaaactaagctaaacataactaaaactagaactaaaaaaaaacaaaactgaaaaagaaagaagaaaaagaaagaagaaaaaggagaaaactaaaattgtattataagtaacttaaatcaatgtaaaattcaatcttgagatggaggactatcatttgattcttcataccttggttgcatcatttgatttggttgaaatggtcttgatggtacaaacatatattgaccattttgattaaatacatattgttgcattggatgacctggtggaggtggtggaggaggaccacctggatgtccatgaattggtaacataccattatgattttcgataatattattagaatttgaactatttgttggaatttgatcattttcaacattattattataataaggatcataaataaatggtggtggtataccttgaggaattccaacaattgttgattcaaccatatttggatgaatttgatttggtgataataaatgtggtggtacatttggttgtaaatttctttgattgtatgattgattatgagaatttgtatttgaattattataaatttctctttcagtaatattaccatcatttgttaattctgaacctgaactttgttgatttaatgtttgttcatcattatcgatataattataacctccattatatcctatattcatacccatattcatacccatattattcatttgagatggtggtatatttgacatatttggaatattatttaaattattaagttgtggtggtggtagattcatactcattggaacattcatattattcattggtaaattcatattcatgttcatattcatattattcatattcatacgatacattggatgttgaagattatttgaaatttgtcttgatctattatttggtctaccccaacttaatctaattcttgaaccactaattataaaaccttgcataccttcaattgccttctctgcatcttttctctcattaaatttaacaaatccacaacctttaccaggtggtactttaatattgacaattggaccaaatggttcaaacaatgctaacaatgtatcttcatgtaaaccatttgctaaaccaccaacaaaaactgtagtgttatttaaatcttcattattatttcttaattgattatttaaattattatgattattaaacattaaatctaatggttgattattatttctattgttcatattcatacccatattattcatactaatattcataccattattattatggttattattattattattttgatgtttaggagatgctaatgcaactctaatttgtctaccacctaaccatttaccattcatttcaacgagtgcattcctcctatcttcttcattactaaatctaacaaatccaaaacatcttgaaataccggttgaaggatcagtcataactctaacagtttttatcgaattgaaatgtgattgaaataatgataataaatgagcttcagttgtatttgatgataaatcaccaacaaataatgaaaattctggggtttgagcaatttgtgaatctaaagttgcagctgaagcccaatttaatctaaaaaatttattattattagtatttggtataaccttaccatttaatgataaagcctcagttgcaatttcttgtgaatcaaattcaataaaacaataacctgaatgattagcggtaccttgaccattagttttagctaattgatgaattaataaatcatgttttggtttaattaatttaacttcaacatgtttatctaatttttcccataaatcagtaataaaaggttcatcccaccaagcttctaaatctcccatccataaagtttttgaaggtacagtatttgcaggattttcaggtggttgaggtaaaggaattgaggatgcagtatttggaattgaagttgttgaagaattaatttcattttgttgagataaatcagcggattctgattgatttggtattgaagttgttgaagaattattaaaataattattaatatcgtttatacttgaaattgattgagtattttcgttatcttcctgattgttattattatcattttcagtttttggtgaagaagaatctatgatattgatattttctaatgacatttttatttaaagaatatataattgaatgttatttgttgaaaaggggaataaagattgaaataaatttttgaatgatcttaaagtgaaaaaaaactgaaaataagctaaactaagttgagcttaattgaattgaattgataattttaatttaatttaatgttatttaatgtaatttaatataatttaatataatacaatgtaatatagtgtaatatttaatttaatgcaaagataaagatgaaaagacagaataaaagcaaacaattagctgaacgattgataaaatgaaaaagcacagatgttatgtaagtaagtatctttagatatactaaatattataattaattgaacaacaacggtgtgattaaaagaacaagataaagaagataatgcagtaataataacagaattataaaaacaagggcaagaaaaacaacctgggggaattcaatttattagcgaaggctaagtttcaaagaggggggtatttgcgtatattaatgtttgtttatttcattaaggtatggaatcacagggtgttatagactctagagagatcaggaaagaggctagaaggagagggaattctcagaggaaagtagctttggatgattttgttttagaactgcctgatattcaaagaaatgatggtaatattgataatattccaattttatcaccacctagaattgtagaagaatctgagaagaggatattggataaacataaggagtttgtaactcaaagaataggtcatatggatgatcatatagagtatgataatggtgatgttgatggagatgatgatgattcaactccagaagtcagacacgaaaataaatcaaagaaaatgaaaactaatgcaaaaccaaaatcaaaatcaaaatcaaaatcaaagactctatatattccatcaactggtaagatgatcaaacattcagtatttaaggaaaaacgtaagaatatgagatctagatcaattaaacttaattataaacgagttccaagtaataaagcaaaattaatttatattgatgttatatcacaaatgattaaagattatttacgtgataatgaagtaattaataaatttattgaggaagtgaataaaggtagtagtgataagaaaaaacgtaaaagaagagggaataaagaagaggaaagtgataattataaggagattgtttaataattgtcaaaatattataagggattattttgatagaattaatgaatattttggtagtttaattgatttaagattatccaatggattaattcgtaatgatataactaggatgaataatgaaaagaatcaattaaggaatgaaatatttcaaattagacaagagaggaataaaattggattagaaatgaaacaaactagggatgaattacaaaaattaaatattgaatataataatagagaggaattatataaaaaattaaagaatattcaaaatgggattgaatttaatgatgagagtaaagttgattataatgatattaagtataaaattgatcgaatagaggaaatgaaaatcaataaatcaaatgttttaaatatgataagggagattaataaacaattagaaatgagaattgaaaattgaaaattgaaaagtaagatgtgtagtttagtttactgtataataataataataataataataataatactgatttatgtataaagtaataagataataaaaatgaaatattatataataataacaattatacattaattaatttaatatataaacttaaattaataaaatttaaatatcatctgcaattaaagcagcaatcattctataaagatagaagaagaacataaataagaagaaagctaattttgagaaagattctctcttatttttacctaaagttctaaaaatttcagttgcatctaataaataatttttagtataaattttattagcattataagctaataaaggtaaatttagtaggaaaacaaaccaataaccattaattaagaataaaaatgtaaggaaaccatgaacacttgcctttgggataataaatttatttaatttattacataattcaattggattaatataatcacattctaaatcagagaatgaaattgagaagaaaacttctgcaaataatgataaagcattgataataacagctaaaatgaataataagatttcccccattgttaagttaataattgaattaagtcaaagataaaaaaggtaaagttggtgatagtaatacagaatagtcgagagagatggaaacctaaaaaaatcaaaaaaaccaacttttctttggctctgtctattagtgagattaataagatttataataagattaatattactatatggcaaagattgaaaaaaaatattaaattaattgttccgataccgggagtcgaacccgggtctgcccggtgaaagcggaccgtgatagccgttacactatatcggataattgttatgtatgtaagggaataaatacaagttgttcaataatatccacgtgaagattaggtaagctgattacgtaaagatgataagatggaaataggaattccgagatacggaggttcggagatgtcggagtaagaaaggaatgacttagattgaaattgaattaattatgataaggagtggtatgattgataaggaatagtttaattaactatattaaggaatggttaatattgtaatataaataagtatgatatcctgtataactttgtataactctcttctgagaggggacattaatcagagtattagttagagaacaatctactaattaataccaaccgtctcattgctactcgctgtctattacacaaataaaaggtccaacgagtaaacttattttatacttattacttccattacgtaattaagtattatccactatcttacatattttagtttacatttggtagcaccggctagtgtttgtgttcctaattaaatcaaattatattcatctattaattaaattaaatcaactaaaaatgtcatctgctaaagataagattaatgctttaaagcaacaaattaaggaaataaaattaactgaaaagaagaagaagaaagaattatcaaagaaacattctaccaaacattcaaagaacgttattaaaaagaagaaacatattaaaccacctcttagaattatccattccgatcctgaaatgtctgattattcatttgatgatgctttttcctcagataattcccattctgataactccaattctgattctgatatttctgattccgatactgatactgatgatgataataaaacttctaaaaatgataaacttagttctaactttccaaaatttgatggttcttctactgatgataaaggcaaggaattctccactactgaagctcaacttaaagcaaaaacttggttatctaagttgcacgttaatttaattgataaaggtatttcaaaatcaagctgggctagaaaagctattgttaatctcgaaggtagagcatacaaatgggtagaacataaattagagaagaatccaaagtatttaaagatttcctgggaaagatttttacgtgatttcaaaaaagaattttgtcctgttattgaagatgatatgcatgctatggattacaagattctaacttttaaaatggttccaggaatgaaagtctctacatattctgatcaatttaaagaatatattcaagaattggattttgaagaatctactaaatttcaaatttcaagatatttacttggtttaacacctgaattgaaaaagatggtatcccaacaaaaacctcgtaccttgaatgctgctattcattatgcagaagattctgaagctattttgaatgatattgaagaagcaaaaccaaaaaatccttggatcaataatatcgaacatcaaactcctgttagacgctcttattctcgcccatatagagttaataaatataaacctggttatcataataagcaaagatttttcagaaacaaaagaccatttaaaaggtacaattcaaattttaccccaatcggtggtaatcgttccatgcatttttctcgtcctactaaactaaataataaactatctaataataataatactagttctttttcttatattgcacctccagtaagtattcaacccgaagttgatcatttaaatgtcgagaaggaagaaggtgatactgttgttaataattctcaaagggtgattccaagagatgagactattaagaagggtgattcctctgaagttaaattgttaaagggtgattccaaacaagaaacaaatagtccaactttaaacattccttcattacctgaaattttacatgttaatgctttgaatattgaaaatttacgaaaaatagatgtacaaattgataataaaaattccgcatcagcaattattgatactggatccaatacagatgctattactacaattttatgtgatgaactgttattatcaagcaagattagattatatgttgaaccaattagtgctattttagttaatgatactgttgatgctattggtgaactagatatagatattgatgttgatctatttaataatcctatcaaagaaaaaagaacatttttagttttgcaggcaaacaccaagaaattaattttaggacttccatttttcaaacaacattatgataagttagatatacatgattttattggagatagttttgcaacaccaagtgttaatgttaatttaattgaatatcatgatagacatatttctactattattaataataaagataatgattcatatctaatatatattaattcaatgaatgttgaatcctctgaagaaaatgatattaaaactattgataaagaaattaataatgttgaagttaataaatacagaaatgatattttagaaaaatttaatgatgttgttactatgaaagaaccaaatgaacttcctcctaaaagaaatcacgaacataaaattattttagttgaatctaataagcaagttaatagaaatcaatatcctttaagttattcagaaaaggaagaattaaccaaaactgttgataagttaatacaacaaaaatttattagaattagtgatagtccttataatagccctgttttatttgttaagaaaaaagatggaaccatgaggatgtgcattgattatagattgttgaataataacactgttaaagatagatttcctttacctcatatagaagaaattatttccaagtttgaatctgctgttgtttattccaaattagatttaatgtcaggttattatcaagtaagaatccaagaagaagatattccaaaaactgcttttagtactgattatggtcattatgaatgggttgttatgccttttggtcttactaatgctccagcaacttttcaacgtatgatgaatactatcttatccaaatatttgaatacatgtgtgcaagtttatttagatgatatttttatttattccaaatcttataagcaacattatgaagatattaaaagtgttttatctacattaagagaacatcatttaattgctaagaaatcaaagtgtgccttcttttacgatgaattaagatttttaggtcatgttattactaaaaatggaattaaaactgatccagataaaattgaaaaggttaaaaattggccaattccaactactgtcaaagaagctcaaatgtttataggtttaacttcatattatagacgttttatcaagaatcattctaagattgctgtaccaattcataaatttattaccaaagaatcaaaatgggaagatgaacaaactaatgcttttaatcaacttaaagacgctttaattaacagtcctattctagtacatccaaaatggaataatgattgtacttatgttgttcatactgatgcttgtggtagtgctttaggttatactttagaacaattagatgaaaatggtaaaacaagaggtacaattgcttatggttctaagaaattaataggagctcaattaaattatggtatttatgatagagaatttatggcagttgtagaagctttaaaaaattggagatattatttattaggtagacattttgttattgttactgatcataaaagtttaatttatctacgctatcaaaatttgattgattcaactagggttgcaagatggcttgattatttatcacaatatgattttgaaattcaatatgttgcaggtaaagataattctgccgcagatgctttaagtcgttatccatatgaaaaattgtctgttaaagatgctttagaagttaatcatattaaatttttaggtaattcaaatagaaattcaaataataatattcaaattaataatactgaagttactgttactacttttcctatgaatgatgaattaaagaatttaattattaaaggttataaaaaagataatgtacttgctgatgtttattcaactttgaaaaataaatctgaaattcctattcatttaaaccaccatattaaacattatcaacttaaaaatgatttactttattataaaacattattagaacaagattgcaatagattagttattcctcgttataatagtttacctcaaagatttattaaaaatgctcataataatcctacttctggtcattttggtccttggaaaacttatcaaactttaatggattcattattttggtttaatatgatgcctacaattaaaaggtattgcaatagatgcattgtttgtcaacaaaataacacctctactcagaaaactcaaggattatttcaaccattacctgttcctgaaggtagatggactgatgttacaatggattttgttactggtttgccaacaactacttcaaatcatgatatgattatggttattactgatagattttcaaaaatgtcacattttattccaactgtgaaaactttaactgctgaaggttgtgctaaattatttttagattattttcttaaacatcatggatttccaaaaagattaactagtgataaagatattaggtttatgaataaattttggtatactattcattttttctttggtgtttctttattgttttcaactactaatcatccacaaactgatggtcaaactgaaagagttaataaagttttaaatcaattattaagaaaacattgttcaaatgatcatttacactgggatgaatttttaccaatgtgtgaatttgcttataatagtacttaccatgattcaattaaatgttctccttttgaattagctataggatataaaccagattctatgaaaagtgttaatagttggaatttagatgataatagatatagtccaaatgctcaagaatatgctagacgtatgagattaactttaactcaagctcaagataatattgtacaagctcaaagattgaatgaaaaatatcataatagatcacatagatttcataattataaagttggtgattatattttattgcatcgtgatgcttttggtgcttttgctaaatattataaaattcaacctgcttattatggtccatttagattggtgaaaaaaattaatgataatgcttttgaagttgatttacctaagattaataaaaaggatagagtattaaatattaaaaattttcgtccatatgttcctccagtcgatttattatgtcgtccacctagaactaatgctgaaattttatcaagaattaatcaaatgtgtggtattgctggttttgatgaagaaaagaatacttttgatgtttattggagagattgtgatcctttacttgctacaactattactgctgatcaatttaatacggcttcggaatcacttcgtcatagtttatttcataatgccaagatgatttgtgctcatgagcaaattgtttaagtatttgatttaatttaattttaacatcagggacgatgtttcccaacagccggggtaatgtaagggaataaatacaagttgttcaataatatccacgtgaagattaggtaagctgattacgtaaagatgataagatggaaataggaattccgagatacggaggttcggagatgtcggagtaagaaaggaatgacttagattgaaattgaattaattatgataaggagtggtatgattgataaggaatagtttaattaactatattaaggaatggttaatattgtaatataaataagtatgatatcctgtataactttgtataactctcttctgagaggggacattaatcagagtattagttagagaacaatctactaattaataccaaccgtctcattgctactcgctgtctattacacaaataaaaggtccaacgagtaaacttattttatacttattacttccattacgtaattaagtattatccactatcttacatattttagtttacaatgtagtaaactgttttgtcaaagtctttgcggccataacacgtgacctccgcgcttttgatgagtttttaatggttttaacggagaatttacttactatgtgtgattagtttgtttacaatattaatatagagttataaaatacataataatagtgtatttgactataaattcaaacccccaatgtctcacccatgactccccatgaacattctagcgctttaccccccccccccatgagaaaaatttgcactcgcgaactcttgaacttcaagaaaattttcactctttgatggcattcagatcaatagcatgaatttttttaattattttaactagtactcttctatatttatgtttgttcctataaacaattggtcactaattgattatattttcaaaattgaaaaacttcaatgaacccctgtcaattttgtgattgtaaaggacaaatatttcatgaaatatatgcatatgacgtgtttttccttcataatcacagaattgacaagggttattgctgtttttatattaaaacagtgtttctacaatttactttgatggcaattacagttatatgaaagatggtttattgattggtcaatacgttcctgatactttttatcagttcattactctcctaattatttttgaaaattaaagtttgattacaaatagtttaactaaagatctagaaagtgttttttaaagaaattctctcttgttttagggtggagggaattaaataacctttcttgttcagcctccgttgattttggacagaaaatttctgtgtgaccattctttggaatttcaccttctttgaccttatgttttggattataacatcttctacaacttggtttcattggacatctagctgtagtgtgatctgtacatctacagtatacacagtgtgtaggtgcagtggacaaatatgttgtaatttgaactttatgtgtttttccacccgttgtgtgtgagatggattgaattttaggtggtacaactgatgattttaattttaacactgtgtaaatgattttattttgttcgtagaacttcatattgaatgccctattggattctttttcttgtggtaattgacaagacataatttctccatattctgaatagagatttttaataattttatcatatttagatttaatgatgaaaggagggaactccgttagtaaaccaacaagtgtgttgttttcttcgaatgattgatctaataaatttagatcatatgaattaaatgtttccactaacatggtggaaactaattgtaataactccattggaggttcaaccaatggtaaattaattttcaaactgtatttgtcagcattgaacatatttgcatcttctttcactgtgttttctatagatgcagtattttggttgttcatattgttatgaactttgttaattttgttaattttttggtattttttttcatttaaaaccttgctataaataggtcctttaaaaatgatgataggatatatcatttaattttctcttgtctaaaaatttataaaaatcattttttaaaaagtatgaaaggtgataaatccatcgtcttcatcaactgtaatatttgcttccgtaattttgttacgtagttgttcagcaaacttcataattggttagagttttgttggcgcatctagggccactctagtattcctcttgatcgtgagtttcgatttgaatcaacccttcactttctcttttatcagcaaaaactggggatcgcctgttgagctcactctgagttaaggtagtcattttggtaccgttaagattgtcggggaggatctaaatcaaaaatctctattaccttttattggctggtaaaatataaggaataatactaaaagactttattttgtttataaaatttaatattgaatgcccttttgaatttggttatgaaaattcccaagacatgatttctccatatatctttggaatagagcttgataataagttcatcatatattgtgattcaatgatgaacggaggagactctgtttttaatgacaaagtcaagtccaaatatatgatgaattatcatcaatctctattctgaaggagatcaccccatggtgactgaataatttgtcaggaatagaaagataaatctttcagaaactaaacgtagaaacttgttttttaaaaaaaattgatgctagtctcatcaccgcgttttgaagcatttttttcataattattttttattcttttagccaatatatttgctaaaataagtttacaaatcaaaacagtttgtttatctctactgattgacaaactcttgaagtcaataaatactttattttttaaaggttggcttacgtaagcagattcaaaaaattgaaaagacaaaataaaaattttgttagcgtaaaagcctggctagctcaatcggtagagcgtttgactcttaagtattgatattaaattaatagcaatcaaaaggctgcgggttcgagccccgcgttgggctttacttttttttgcctttttagatttctaaaattttttttgttgggacaataatttttggatgattaatataaaatagtcagttattattattattacaatagcaatggtaatgtcatatgatgatatacccaagggatattttttaggattaaattatcaaaatattcaattaattaaggaaatacttgaatggattgatattgataataatagtggaaatatccaagtaattgatattggtagtgggaagggatttattgatagaatattaacaggatattataatataccagtttattgtattgaaagtaataaagatagaaattatcaaagtattaaattacagagattaattaatgatgataaaattaatcgaattgatcctgataataataataatattaatgcaattaaattattaggtagttgtaattgtaaaataagcaattatgaaagttactgtaaagttgtaagggatgcgttacaatttttcaataaagtaagaataagtagtactagtagtaagatagttataattggtataaaattatgtggggacatgatttatgaattaattgattatcaaataagatacagagaggaatataaagatgaagatgaagataaatatgaatatgaaatgtttattataccatgttgtacagagttgagtaaacgtggtggtaacagttgtgataatgtaatgaggtattgtaaagagatgaatacagtagcagaaaagagggtatttggagagaagtattatggagttaagatatagatatacgacatccaatcagtcaatcttaataattaccgaaacgggaaacataaaaccgcactttgttttcttttccttttcgcataaattttattttattttattttattctcatgggtttttcaaagttttccatgttccaaatttttttcatttaaattgatgacacttctatttcttctatttcttcttttgtttttgttttgtttattctatgttctaaagtttattttaccttcttctacttccttttaatctctttcatttgtcaagaacattcaaatgaaatttttatcttcttctgcttggtcaattgcagctttcactgctttttctgctgcagccgaaactactaatagttcatcttcatcttcatcttcaaataatataacttatgctccgtatgatgctacttgtccattatacaatttatcaccactttacaataaaacttctcatgatggtttcattcgtacaaattctttaatttctcaagatgaatattcttatatttctgcaagacaagttaaagcaaaatctaatttaattgaatttttagataatttaaatatcccagattataatgaaacttcatttgctgattatttagatatcttaaatcaatcaaatattaatattggtttatcattctctggtggtggttatagagctttatttactggtgcctggtgaattaatggctttagattcaagaacaactactaattcaactttaaaaggtttattagattcttcagtttatatcactggtttatcaggtggttcaatcttattatcaactttagcttttaataattggacttcagttgaagatattatgttagataatacaacaacaatttggaatacttctagaccaccagttagtgctgatttaaattattgggctcaattaattggtgaagttaatgaaaagaaaaaagcaggttttgatatctcccttattgatgtttatggtagaattctttcaagatttatgtttgaaaaagaatttgatgattatggtttaaatactttattctctgatcttcaattctctgatgctttcatgaattatgatatgccattcccaatgattcttactactggtggtacaactaatggtacaaatattactgattattcaattaacgtctttgaagttaatccttatgaatttggttctttctcacctttagttggtggttttattccaattgaacttttaggttcatctttagataatggtttaccaattgttaatgaccgttgtacttacgattttgataacgttggtttcttagttggtgcttcttcaaatatcttagaatctttccaagaaccttttgatttattaatgagtggtaatcaatcaattgctgctctcttaagtgctcaacttggtgctaatgttagttcatcatatattgaattattagttaatgctgttaaccctaatttaaatgaaactttatttgcagttcttgacaacccattctataattcctcattagcttcaaatgaaagtgaagttgctgatggtaaattattaaaattagtcgatggtggtttctttgaagaatcagttcctcttgatcctatcttagcacctgcaagacaaattgatattgtctttgcttttgataacaatgcacaaactgaagataactggccaaatggtgactcattatatgcatctgaagaaagatggttaagttcattccctgatgatgaattttatgaattaccttccttaagtgaagaatttgttgaattaggattaaatacaaaacctgtattctttggttgtaatggtacttcattaattactaaccaaactaatccaaatgcaactgttgaattcaattacatgaaaccattattagtttatattccaaatacagattacacttatgaatcaaatattaccaattatcaattcccaatctcagaaagaaatgctctcattcataatggttttgaaattgctcaatataataatgaagaagatgattttgctcaatgtgttggttgtgcaattattagaagatctgaagaaagagaaggtattgaattatctccattctgttcaagatgtttcactaaatattgttttgattcatcatatgttgaaactgatttaggtaactcaactttagtctcaaatataactgaaaatatcccaacttcaatttactcatcatctgcattaccaagtgcaatgtcatctttattaacaaagagaagtaaagcaactgttttcccaactgttttcccttcaagtgcttattaggatttatgattttaatataacatacatttatttatacctacaaaacattttttgattcccattcgtttttatttaattaaacaaagattacatttactattgatggctctatatagctcttatttttttaaaagattgtatacattatttttatataatttaaactattaaaagcattcatttactctcttcatacttaattttccaagaatttaaccattgaactctcttttcattattattattgattttacgtactaattcaactatttgattaatttcctttgttagtaattttgctgctttttcaacaccatttaaatcggaatcatatataatacatgcaattatatcatcaacatattcattaagtttcaatattttttcatgtagtatatccaaacttttagaaaatttaacagtatattcactgtttggaattgatttatctaatagtgagattaataatttaactaattgaatttttttactatattctttaccagcagagattatttcatcacctgctatatcatctccatcatcattatcttcattcccactatcattatcattaccatcatcatttaatccaaaaatatcatcttcatcataatcaaaacctcctccaacaattggattttctaaccattcatttaattcatctaatgcatcaataattatcttatttgttgatttaagtttatttcttaaaactccacttgagcctgatttactagtttttaaaagtttttcacatgattcccaaaccataccaacacctataagtcttggatcagattttttgtttccttcatcatttccttcattactttcttcattttcttcctcatttggtaataatttatttaattcttgaataagtataattacagtatctaaaacatttaatgaatcactacttaattcattaatgaaaacttttgaataaatttcaacacttgaatttaattgagttaaaagtgatattaataataacgaatatctaacaatattatcaatttctgtccaacatgcctttaaagttgatttttcaattggtggtttgaaaactaatccaagttttgttgcatgtgcactaataagatttgtaagtttcggtatttcatctaatggttttgcaatttttgttgattctaaattaattaaattttcatttgaactagttattgagttttgaaaattaatttgtagttgttgtaaagtttcttgaactgctgtaatatgattggacaaatcagctggtgtcttctccattgtcgtttgtatgttgggaaaaagaagattctacaggtctttaaaaaaatattttttttccacaagaaatttcatgaaatttttcatgctgtgaagattgatcggagcttacactttatcttcgttttaacgttttataatctctacaatgtatacagatacagaatactatactataattctaaaaaaattctaccaatcaccatcactttcatcatcagatgctgcaactttcgcctttcttgaacttaaagcagcggctaatgcgtctgcaagacttgcaggttgaccaggtggtgcaccaccactgttatttgaacttgtagtatttgtagtcgttggttcaccacgagcttcctgtaataaaacacttggtttatctaattgtgatttatcaactttacgtaaagatcctaaacctgcacctctaattgatgcaagtaatgcatctctacctgcatcacctgtatgctcaactggagctggagttgaatcaaatgttggcattccaggtggcggtggaggtggtgcagcagaagaattaaatgtaggcataccagctggaggtggaggtggtggagctgcagcattagagttgaaagttggcatacccgctggtggaggtggtggaggaacagattgctgttgtattggaggaggtggtggtattgactgttgcatttgttgttgcatcggaggaggaggcggaacttgttgttgcattggaggtggtggaacaatacgttgatattgttgttgttgtatttgaggagaaccaggatgagcaggtggtaaaataggtggtgattgtgattgatgcatttgttgtgaagttcttgaagcaggtggtggaggagcaggacctcttctaggtggtggaggagctggtgcattaccccttgcaggaggtggtggtggtacgttacctcttgcaggtggaggaggtggtacattacctctagctggtggaggtggaggtacgttatttctcggaggtaatggcagaggtctattggtagttggtattggtgatgaagtagtcggaggtgccaaacgtggaggcagatttgggtgtggattatttaatggaggtggaacattatgagttgggaatgtcattggaggtggtaaattatgaacattacgtttttcaggtataggagaaggagatggatccgatgatgggacttgaggagctgatggtgcaggtgatgaatattctgaataagaatcataatcatcattagattgagactgagattgagattgtgcaggtggtggtggtggaggtggttttttatttcttctactatcagaactcattgaacttacagttgttgatcttgatcttgatgtaacagcttgtttcattgaatttgaatttgaattagaatttattgatgaatgattattaatcatattttgatattttcttggaattggaggttctaaaccaactaatggaccaccttgttttgtaatataatcttttataaattcacgattttcagcaatcatatcttctgtaatacccatattttctaattctctataaaatgatctccattcaggtggtggttcattatcataatatagtacaccttttgctcttctcattctttgttcattgaaaattgtatcagaattatcagtttcattattattattattaatattttcacctctaaaacctcttgaatttttaatttcatcaggtcttttacgtgcttcaactgcattattattctgtatagttaatttagatgcatgtttatgtctatttattactcttttataaaaatgttgagcatcagatttatcatcaaataggaaaccaattgaataatcatctgattcaaaactatgaaagaataatctatcttgagaatattggaaatctacccataattcatgatcccatataataccttgtttaccaattatatcaactaatttaaagaagaaagtatgaccaattaaatcatcaacaagtatcaaagcacctgttaatccagtccatttccattcatctttatcaggataagttacatataatctaacaattgcagcatcaatgattttattagaggatttgggtacaacccttttaactacttctttatcctgtgaagatatccccatgatcaattgtctatatcaaaggaaaagaaaggaataataaacatcaccattatcatctccaaataccaaagaaagactttacgtactcgctttctctttatgtgggaaattgaaatttattatattttattttattactaggaagaagatttttatctcttttgatactttattttatttcttcctaggagtaagagaacaatgtccggaagacaaggtggtaaagcaaagcctcttaagaaacctaagaaggcatctaaggatttagatgatgaagatcttgcatatcaacaaaaattaaaggaacaaaaaaaattagagaaagaaatggcagcaaaggcagctggtaaaggtccaattgttggtggtggtattaaaaagagtggtaaaaagaaataatcttgtactatttaatctaatatactatactatgctatactatactatactatactatactaatcttttatacattatataagtaacatatcgtcctcttaatagaagtaatctcttaattcattacataatcaaagaaaatgatttatttggtgattttcataatgttggacatgatagttatatattgatcgactgattgattgattgattgatctttcttagggatataatatacaactagattattaatgagtgataagggtacacagaaaatgctgactaaacacaagattgtgtttcttggagatcaaggagttggtaaaacttcacttattacaagatttatgtataatacatttgatacacattatgcagcaacaattggaattgatttcctttcaaagacaatgtatttagatgataaaactatacgattacaactttgggatactgcaggtcaggaaagatttcgttcattaattccttcatatattagagattcaaaagttgcaatgattgtttatgatgtttcaaataaggaaagttttgatgatattccacgttggtgtgattatgttagaactgaacgtggtaatgatgttataattgtacttgtggggaataaatcagatttacctgatagagtaatttcaactgaggaaggtgaaaaattaagtaaatcacttgaatttaatttatttatggaaacaagtagtaaaaatggttatggtgttaaaaatttatttaaaaaagttgctaaattattaccaactgctaattctggtaatgatgataatgaaatagataatgcaattgatcaagataataatgctcaaactattaatatatcaactgatacaaaggaacctgaaagtgattcatgtgcttgttaaaaaaaattaaataattagtaaattaaatcaatacatatttctaattgtatttctatatttttatatattctatatattataatctacttaatatatattataggtctaaataatttaataattaaataaaataagatggaaatgttctaaaataggaaggaaaaaaagagagaaaagtattactatcatatcataaatacttctttaaaccctttaatctatttgcagcatcaattaaaacttcatcatctttacaaactgcaaaacgtaaacaatcactaataagatgagcatcttcaggtaaataaaattcacttggaggaattgagacaacaccaaattcttcaattaaccaataagctaatttaaaatctcttggtttattagcaattaattcaggccattctaattcaggtaatttaacttttttcatattaactaaaaggaaataaccaccatcagctcttgtataaggaatatctaattcttcgaaaactttttgtaaaatttcatattttttcttatattgatttctcatattttcataataattattagaatctgcaatttctaaagcttttgcaactgcaacttgagttgcacttggagttgaaaagcaaattcttgtatgagctgccttaacataaggaattaattcctcagaaccaataacccaaccaattctccaacctgttgcagcaaatgtcttaccagcagaaccaacaaataatgtacgacgtttaatttcaacattatctgaagctgcaattcttgggaattcggcatcataatataaattttcataaacttcatcagataaaataatgaaattatgtttaacagctaattcacctaatttatttaattcttcctttgagaaaattttaccaattggattatgaggagtattaataacaaccattttagtatttggagtaattaatttttcaaattcatcccaatcaataaaataatctgaaccatcaacatttttagattcaaaaccttccggagtatgtaattttgcgaaaacaacttttgcacctgtcatttcaatatttggaatatattgatcaaagaaaggttgaaagacaattacttcgtcaccttttgaaaggaaaccaaagaaaactgcaaacataccttcatttgcaccagttgtagctaaaatttgattatttgataattcataacctaattttttagaataatgtttttgtaattgattaactaataaaggtttaccttgaggtggagcatattgattatccattggttgatcaaaagcgtcctttgcagctttaattgcaaattctggaggtgaataagagaaaaatccttgacctaaattagcaactttttcaccacttttagcttcctttgcagcagcagtttcattaattaaagaccaaatatctttaccaccaagtgaaaaatatggattatttgtaggtaattttgatgtcattttatttaataatgaatagtttcgtacaattgaattaggcaatggtctgagtgagggtactttaaatacagaagtaaatgccagaatgtgcatgtgctgaaacctgaaaagatccagaagcagaaaatacccccgaaagagaaaacatccagtatttaaacaaactgttgaaagcattataaaataaaactgtggctcaaatcagcataataataaaattaaaattaaaacgctcccacagttttgcgataagagagaatatgactcagtagtattagttacttaaagtattagtattacatgaatcgctcgttttgacgttttttctgatttcctctttaggaatatttaattttcattttcattttcattttcattttcatttatttttatttttatttttattttactttctattggtaatggaaacaccatttgaatgtcctcattctgctttggaaaatgctccacccgctcgtcatactcgtatactacgaccttatatagaaactcttattgctcacgatacagagaaaccaattcattcaaatccttataatcgttttaatattgcaagagattcaattcgtgaagaaactttagaatattggttatcagataatgaaaataatgatgatgataatcaaagtgatagtgatttatcatctgattctaatatacgtaataaaagacgtaggaggaggaaaaggagaaaattgaaaaataatgggataattgatcatgattcaatggtcaaagtacctaatatggatcattcaaattatgaatttaattcaaatgaaattttacatttaagacaacaaatgtttttatcactttggaaaagagcaaaatctcgtaaaatacctagaaataaaaaaacaatcaatggaaatgaaaatgaaaatgaacgtgaaagtatgatgacattaccttcaaatgttaaatcaaaggacataaatactgcattaatagcattatcaggatttgaaaaatcaatagagaaaaatcattttataaatttaaattctaatgatgataatgataatgataatataacttcaaaagtctcatttattaaatatctatctcatgcaattaataatttattctacatatcattatataatcaacaatgggataattgctataaattatttagtatactattacgtacatttgatactgatattttacaaatatggccattgggtgtatacattttaacccaactaaatactgaacaatttaaagaaaattttattaatgattggcaaacacattataaacatttaccattacctaaaatatcacaaaaaatttatcatgatttatcatttttacaaaatccaaatttagttgaaccattgattaatgatactccaatttctcataatgaagaaattattcatattttgaaaagaagtgttgttaagaaacgttcgatgcaagatacaatttttaaattacttaaattattaatgagaatttcaagaaatcaattccccttaattggtgcatttcctgaacaaatttatgtaccaagtggtataattaatcatgatttaaatggtgaaactgattatggaactgaaacccaaactcaaacggaaactgagactgatgctacaagtgttagaagttcaagagttccatcatctaataataacacagaaaaggaacaatctaatgatgaatcagtatcttctgatagttcatatgattcagaggaagtttatgaaaaaccattaccattgattaataataataataatattgtaccacaaacaagttcagaatcagaatctgaaagcgatcttgatagtgaagatgaaaatgataccaatattaaccttcaagaaagactatcatctcttattattaaaaaatcagattttaatccatttgaggataccagacaaccatttcaacatagttatagaacattattaactaatcattccacacctattcatagacatggtacacgtacacgtacaccaacatttacattatcatatttatggttattagttagaacaggacgaaatggtgcattacaacgtgcaattgaaccattattattgattgttccaacaagtattgatgcaagaattgcattaactgaaataatgagtaaattattagatgttataagtgaaattcagaaaaggaaagatgataaatatgatgaaggatttaataaatgggagaatgaagaaaatattaaattaaaattaaatgaaattgaatcatcatggaatacttggaaagatcaatttacgagtaagagaaagaaaaagaggaaaggtgttagacaatatagtaattatgaagatgttgcaaaatctattgaaaatttgaaaaaactagttaatgaatgtttaaaagatgataaaaataataacaatcataatggtgaatcaaatagaggttatggtggtaggaaaaggaaagatagtttgagtgatagtgatgatagtgatgatattgatgaaggtgcagttgaagcaaatgaatgatgatgatgatgaagaggaaattaggaaagaaatggagagattgttgagttattctaatgttggagatgaggagaaaaatgtagagaatccaaataatgaagaggaattggaagaagaagagattgatgatgaagacgatgaagaagttcaacgtgaaatggaaagacttatgggatattcacaagctattgatgatgaatttagtgagaaagtaaatggagaggaatatgaagaagaagatgatgattatcaatttcaagcggaagaggaacaatttattaatgaatatgttacacaagataataatgatagtgatagtgaatgattttactatcgtttatttatattttctaagaatgaaattaattcaggacatttatcattatcatgacatataattgaatgattccatttgatttaatctgtaaaactattggattaatattatttggtggatcatattgacttatctctattttctgtttctttagttcatttttcagaatgttcaatttcatcctgtaatatcaatatatcatcatttaattgattatgcctttcaatattactattctttgttttctgtgcctctaatataataaataatgtagttatcgtatataacattatttcacttataatgaaactaccatgttgtacattataattatttttattattatctccgttgtttgtaactagtagtgtcttctctaattccgaattccaattttgggtcaatttaacagtatttatacaaatatttcttatactgttgtttctaatcgccaatgcattgatacccaatgcaagaggtttggataattgtcttacaaacagagatagtaaacgtaatggaggacctgccatatatcgacgtcctttatcaaaagactctcttagaaatcggataaagatttatcagattgaggaaaatcatgtatatcatcatcaatttatacgtggctattttcacattttatgcattatggttatatgtttactctttattagaacaagggacaagatggttatgacaatacaacaacaacgaatgatctttggtggttatgcagtatgtagtatgatagctacatattatagatttttacaattgaatgatacatcaagcaattattatgtattagcatccaaattctcacaaggtgattcagcaattatacttggtaatatgactgcagtaattacattgattgttggtaatttattacaaaaattaatatttggagaattaaggttaattgaaagtgaacatctttatgagagatcatggtcaacaatacttggacttataatgtcaggtagtatctataaaagtggtgataatataatatttttagtaatgtatgcatgtggattaattttcggtaaaacatttcatagtatattatgtgatagattagatgcatcaattcaacaatattatcaaatcaatatggtagatcatcataatgtaaagaaaacattaattaaaattatatttaatagaattatattaacattagttttattattaaagattgatttcaatgttattaaatctcatattgatgaatcatttacacataaatcaccaatgttaatattaatatcatttgaatttttcattttgtttatggaattaatttattcaacaattaaatatgttgttaatgtttatgaaatttattatattgaaagaaatctcgatgaagagaaatggttttataaagtttgggttgaatcagttttcaaattaataattgatttaattaagagtattatgataccaacattttttgtttattcaattagtattggtacatttcaattttgtttaattactgaatcatttagatcattttatggattaggtacatcaattaaaacattagttagattagttcaaaattttagaaaattaaataatatgttacaaaatccaacaattgaagaaatgaaaaatattgatatgtgtataatttgtcgtgatgaattagaaattgatggaaatgaaaaaaatgagagtaaaaagccaaagaagttaccatgtggacatattttacatgatggatgtattagaagttggttacaaatgtcaactgcatgtccaacttgtagaaaagaagttttctcaaaggatggtgaaataaactctacaatagttgataatgatatagggagagttgaaattgaagaaagagttgagcaagtgggactaattgaagaacgaattgaaccagttatagaaccagtggtagaacctacaagacaaccagaaacagtacatgatgcagaacgtgtaagagcatccaatgaagatagtggatatgattatgatcatactgattattccgataatgaaacagatgaagaaggctcatcaaggtcttataattatgatgacgaatatgcatttgaaggagaattttttccaacagctgctgatgatatgcagtattatattgataatggaatggttactgattttcatgaaaattttgaaaatcgtgaagaagaggaagaagaaggtggtgatcattatgaaactgatccatttgataaatatagagacgatgaaaaatgggagtatgaaaaggaaaagaagaaagctttattacattttcctcaaatgagtgtgaataatagtgataataataatgatgatgataatgatattgttaaaattagtaaaagattttccaaagattggattattttgaagacacaacaaacaagtgatggaaatataagtgttccaatgaatgaagctagatttgaaatcaagaaacaagataatgatttctttttaagtaagaaaattcaaaaacttttcccaaatcaatacccaaaagatgacgacaatgaatgaatgatatagtggacatgaatgtataagaaaatttgtttaataataatgatttaataagattattaagatacataaatacataagttaatataatacacaaaagaaagttgggatgatgcaaagaaaaaaagtgagattaataaatgattgaattaattaattttaatgattatttattctttgatctttcaacttttaaaagtaaagctttattaatatgaggtaaaacaccaccataagcaattgttgccttaattaaagtatctaattcttcatcacctctaatagctaattgtaaatgtcttggagtaattcttttaacttttaaatcttttgcagcattacctgctaattctagaacttcagcggttaaatattctaaaactgcagctaaataaatagcactctttgaaccaactctaattttactttgagcagttttctttaaatatctcttaattctaccaacagggaattgtaaacctgctctagcactatgagattgtgatttaaggtgaccatcttttgcacctgatttacccttaccaccatgtactttacctgacattgttatatactaaaataagcaaataaaaaataaaataataacaaatcaaaacaaatcaaaagagaaaaagtaaacaacatcaaaacggaaacattgaaaatcgaagacatgcacccccttccctttaaaattttaaattcgcgctggtttattacataatgctattacataatcaattatttaaaatatttgagagacacggtctcttgtctggtcctgccttgctctctgtgctctgtgtggtggtgctggtgggatgtgtaggatgtgtaggagtagtggtgctggtgggggtactggagagtggaggtagtagtgctggtggtatggtcgcttttatattcgtagtattgttcgtaatgttcgtaaggttcgtaatgttcgtagtattattattgctatagctcattggtggtggtggcggtaatgtgaactgttgtccatattgtgatatataatttggtggatgactatttgccttaatagcatgcactcgttgatgatacattggtgaaatatatggattattagtgttattattgttattattaatattattattattaatattattattatttatttgagaatcaaatgatatattattagttggtgtaacattagttgatccatatggtgaatgatctgtgaaatttaaaagatatggtgaatttgtattggaattcccattagaagtgatactattattagaactgaatactagaaatcgtgcttgtattagaaatcgtactagtatttgaattagtagttgtatttggattcccattagtattattagtattatctatattactactgttattgttattgttattattgttattattattattattattattactttcattatatgatacaactaaaggtgatattatacttgaatgatgttttggtgttataatgatcggtattggtttatctgataatgatggtctgaactgtgttacattatgtccattaagtaatgttgtacttcttggtggtggtaacattgcattattaggtcgatgttgttgatgttgttgatgttgatattgttgtgattgttgtggtgataattgcatttgtaaatgatgattatgaatatgtggtgaaattgatgatggtggtgataaattgcatggataaagtggcgtcttaggatgactatgtttaactatgttctttggattatatttactattgatattattattattattattattattatttatgttgacattattgctagcaccagggatagtattagcattattaccattactattattattatattgatgtacagtttgtttatgttgacgtaaattatcaagtcttgaaaactttttcaaacaaaattcacattgaaacggcctttcacctgtgtgttttcgaatatgtcttgcaagatgttcagatcttgtaaataccatattacatcctttataacccgtacatttaaacactttaccacgtgcagctgatgatgaagtagaagttggtgtcgatgttgacgttgacgttgacgttgccgttgccgttgatatttttgttgatgttaatggagtatcgggcgtatcaggtgttggaggttccatggatgattatatttctattatttttgttattccgttaatttttgaacaagtgacagatatgtagagttatgaaagaaggttcagtagaccaatcaagcattaatgaacaaaactgtacacagatcgtcaaaggtatataaggtacacccttttaaaaacaataacaaaggggaaaaatgcggtgagtgaaaatttacatgtaatacagttttatttagaaactgtttgtttgctgtttacaggtaaaggttatttatataaatacacggtaatatattatatatatggatctgattacttatctggaggaacagtctcaattggagaggagtgctaaggaattcttacctggtaatatagatgaatgtacctattcccttggtcaaataagacaatcactatttgcatgcgtcacgtgtcaaaatgttgctctatgtgatgcatgtgcagttaaatgtcatacaactcatacagttgttgaattatcatcaaagagaaatactgcctgtgattgtggtacaactaaaacaaaatcaccatgttttgtacgatatccagcttgggaaactttagattttaaagattatacacccgataccgcctataataataaatattgtcataattatcaggggaaattttgttgttgtgatatgcctgaagataatgaaaaatatatggttcaatgtatacttggagatgcatgtaatgaagattggtatcatgatacgtgtatattgaataaaaatattgatcttgattcatttgaaacattaatttgttggaaatgtgttgctatgtatcctaagcaaattgaaattttgaaaaacattttgaatgcagttacagttccaaaggatgattcatatactttacttttgaaagaggatttcaaacaagtattagaacagcatattcaagataatgatgaaattaaagaattcttagagaatcatccttacttgtatagtgaagacccaatatatgaaccacattcagatactgattctacatcttctctgtttgaactaggtcttaaacaaatgaacaaagtacccgttgagcaggtatcaaagggtcttgaagcatatgataatattaagtcaaaactaactgaatttctcaaaccctttgcggaaactggtcatgttgtcacagaagatgaaattaaagatttttttaaaactatacagaattagagtaaattaaactgaactatttactattagctttaagtacttgtataataccttcccaacttttcttatcattagccaactcacgaagtctacgattaataaatgcttgttcatctcgtatactcttcaatctcatttgatgaaatatacctttactatcctcaattaattgcttatttaaaatttcaatactcttcagttctcttgtttttctcaactgctaaagtagatttctcttgatattcagctcgtataactccactttccttttcacttgcttcaatttccatcttcaaagagcttatttgttcctttaatgattcgatatcctcattactgcctttctttaaaacatcacgtacttcaactaatttttgatattcactttcattacgttcctttactttactacgtaattcaatctttaccttgatatctctattctttttgaatatttcaccaatctcataattcccaacatcaataatatcttctctatttgtttcctttaaatgaacatcttttaattcattttcactattatcaatccaaatattcattccacgaatattctcattgattaaattagtaaggtaatattgatatttttgataagtgaataccttaggaattccttcaccacttaatttaatacgtttatttccatctggtctcgattctaatgtatctttaactcttaaaatcagactttcatcaaatactggtctatatttacttttaatcttttcattatatggatattcatgatttattggatcaataatccattcaatcatcttattatcatcaacctcatccttcttcgctttctcttcttcattactagcaatacttaataatgttaaaagtctactagaatattcttcattctcttgcatcatttcccattcataatgttctaatgattcaataattataggttttaaaacatgtattttattcttaactatacttgacaattcttcactttcattggttttacaatcaagtgaaatgactaaatcactctgtaggtcctcaaattgtaataaatattttaattgtgatgataatataagataaatattaattcttttactttctttttcttctaatatttctgtaaactgtttattattcttggatattttaggtatatattcttctgtttcatcacgacccttatatttttcagtatcttcactaacggatgaactttcacgagctgcaattgcagcattaatttgtgcattttgttcacgagcacgtttctctgcacttgatggcctacccatctttttcttacgtttagtatcttcctgtgcagtattttcaacaggtgatttctttgtccttccattagttttccttttaactgttgatatttcctcaattttaatgttttctcctatagtttcatttttagaattccaatggaaatcgaatgacccgtgattgtcataatataacgaggatccagaaaatctataatattgtaagccatttttaccaattaaaactgattcaatcaaatccatctcctttgcattagagacactgattataatagttttcttgactttcttctcaactaaaccatccaatatgttactgatttgtaaatatttatttgatagactaataatattttcctttgaattcaataataataaattttttggaatgtaatgatcaactaataatgttggatgatgtaaaatttgtttacaattaaagttaaaggcttcaaatatggaattatcagacatttgaccggatgatccatcatttcctatctctttcttaatttcaccatcagcttccttatcaatgtcatttggggaaattttcaaatcttttaaataagaaagtaaatgatttttatgtaattgaatgagtatttctttcaaccttttctgataaatggtctcgtgtagtggtaaataatgtacaggtaccttatctgattgcattgttccttgcagagaagaaacaaatattgttgaaactgtcagtattaatcgatcaacctgaaaaaaaagcatcttttcattcgctatataaaaacctacaaattgtacacattttttgctataatatactgttaatattaatgttactaaagaaactacttcctattcatgacaactactccaatgacgaatgtattcatgaaatccatgagatttatcacctcttagaaaacacatatcacatccatcatattgacatcgaaatccaaatgtttcaatccaacaatttttacccattttgtagcctataaaccctgattttggtaatttaacaaactgtccgtttgtattaatcccatgtgtattgattagatgacctctgtaacaactgttatttctctcataaaataatgaatcaatatcttcacctttggtaactttacaaaatggacataatgatggataatcacgcttgatttttttacccttagaagttatattgatcttctgtgatataccgtttaatcactggatcatatagtgttttcacctctgactctaagtattcaaagttcttattaccgaaatgtttaacaaattccaacgaataattattaggggtgttatattctctgtatgatttaagatttggtagcctgtcgataatttgctttatacatccataagtgtttttcgaaactttgaaacatccttcacatcgatgttgagcaagttcaattcttggtatatcttcaatactttccaactgattggggaaaattctttctgagcttgtgttagtatcatcagtatcgccatcattatcatcttcattattattgctattacttactgtgtttggactaatatcttctactttaaacttatttttacttatattatcgttaggtaagacagtattttgattaggcttataacaaaaactatttcttggactaatagacacatcttcattggattcactcatcacacttgatgataaatcaaaattttcaaatcttggtttgttatgaattattcctttgggagctgattttcttctttttgatataaaattttcagatggaactgaaaatttagatgttagaaatggaggaattgaattatctaaatttttctcgtgtttaaaggcttcaatgtgatcattaccattgtaactatcacttttctcaatactaaaactattagaatttgaataattgaaactttcagaaactgaacctgatgttaagctattgaacattctatccggagtaataagtaactcatctccaaaataattataattaatatttttattattatttctgtgcaattcataaaaaatatcatcttgttggttgaaatttgtcatatttgactgaaattcaatctgaacttgactttgtgttttaaccagagtttttggtatactttgagcactttcttcaagactcaaagttgtatctgaactaaaataggttaaactgttcatcaatgaagaatctgtactttcctttgactcaatgggtgttaattctgttcctacttgaggcgattcgtgaaataacatgtcaacatcgtttaatagcatattgattgattcttcgtattcactattaccctccattttgtgatatttttgttactcaatcaatggagaatagattaaataagacttttaaaggaagattttagatattctagtagtacaactataaaagaataaaagaaaacctaatacatttaaaactttaaatttgacagttaacagcacaattacaatggaaaaactttatttcttttgttacacaatttatttaaactcaaatttattattaggttaaacagagtaaaaacaagcggtgttaaattataagaagaatatttcaattaatcggtaatataacagctgggcagaaacgcacttccttagctgggggtataagattactcaatttggtaatgacattaaaaaaacattctatgtatggtttccaaagtatatattctagatctttccaaagcagaaaatgggccttctcgagatacgtaaacacagagtaaaatagaaaaaaatgtaataataccatatcctaagttagaaatgttctgttttgttctatagaatgaaaaaattattctgggctctattggaaagagtctttgtagatcttattgacaataaattatgtcatattgtctaacttttgataagaaataccggctctcttccttggttaagcacttgctcccaatctgtatattatgagactataatcataattaatggtaataattacgtaatgagatgattctcattttatttggagccaacttttcaaaatctccggggtttatgcatgatgatgaatgttctgttggttcaaacatctttatagggtttctttgctgggtaaacaacaatgtttaaggcttttacgtcggtatttaagaagaaaccagtagtggtcattaatgttacacccgaacttgtacagaaaagacacagattatcacaaaatcttcaacaaatttacaaatcacaaattgatttgatgaataaatcagtggataatattgcaaaagttccacttataaatcactatatagctttaaatgatcaatataaaactcaatataaggaaatatgtgataaatcatttgaaagtattgattatagtgaagagaattcccttaagttaatcaataaacaattagattttaaagtttcagaacttgaggcaataaataataagataacaattgatgaattattatcacttgatgaaaactatactgaccaaattgatgattttttcttcaagtttcatattaatcgaataaatgcttcattttcattaaaggaatatatttatcatgaatctcttttacagaaacattcatcagagaaagtactcaacgatgcaataaaatcaacttcaaaaatcttatccttaaacgattatccaattccaaaatttgttataactaaatcacaatcagaattccctgaaatttattgtattgcacctcatattattcatataatgtttgaattatttaaaaatgcaacaattccgtcaataacgcataataagccaattactattaatattattgatgatattgaaaatgaaaatgttatttatgaaattattgataatggtggtggtatgccaactcaaatgttaggtaaaatttggcaattccattatacaacaagtaaggaaactgatagagatgtaattcatggatttggaatgggattaccattatgtaaagtatttgctaaatttaacaatggttcattagatttaattaatagacaaggcgatggtgtaactgttagattaacattacctaaatttattgaaaaatagttaattatatagatttcatattatagattgatataatatattataaaaagaaaaagttatattaaacatataaaactctagttcttcttttgataattttatcaatatctttattcttattattataatctttttcagcttgttcgatttgatacattaattcatttgcatcagtttcacacataacttcatccctaaatataaaataatcaccttcgacatttaatccacaaataacacatttcaggcaatcaatatgaaatgcttcactaacatcgttttgtaaacattcaccttcaacacctttatgacaaacttgacatagtgatccatttaactcatggaaatgtgattcacaatatggttgattattgaaaacataacatgaactacctttattgaattttgcattacatgtattacatccaaaacattttctatgccattgacctgtaagttgatgatcctttgaccatattttcttctcatgttcaaaaatttctaatccacatttacgacatggtccttcaccctggtggataaataatttcctctgtctgttgataatgaatattatcatcattatcagtattatccacaatatgattatcaattgtttcatcaatattttgttgtttgaatttcattttcaaatttatcttcatatgttagatcatgatcaggtgtcgttaatccagttgatggtgatcttaatggtggattacttgaaattgaattagttttactatcaaatgataatgcagcatatggatgaacttttgttggtaattcattatctaacggaacttgtttctcaaaagtgacgtggtggtaaaactaaattatcataatttggatcattcatatcgaatttttcaatattatctatcaatttagacactggatcctcattttgaccttcattttgataatcatcaatagatgggataacaggttcagaagtcggtggtatagtttgattattgttaatatttggagttgtaattgctgttcttttagtgaaacctaattggattcagatgcattatcagatacttgtggaatactatgggagcttgaattatcaatatcattttcaacatcacccttaacatcatctgcatcattaatgtcttcatttaatatgctatctgattcagtagttatttgaggaatttcatgatgagatagatttgaatgattcatatcagcctcttctaataatgacttttcatttgattcaatttcatcaacttcatttatttcaggaattattaatacaggtggtacccttgatgcattttcaatttcaggaattgtggtattattataatcaattcttgaatcttcaatttcaccttcttgaatcatactcatttcattagagttatctagattaccatcattaagactttgtaaattataaatattcatatcattagttcctaaagtacttaatcttttaacattagtatcttgatatggacttgtaatatctggaactaatggtaatccttcaaattctgttgactgaatatttttacgcatacttgtcagtccgccaaacgaatcttgagaaatattatgttcattatcctctgcggatgccatgaatttatcatcaaatgatccaatagatgcaacagatttatgtgataatttatcattgttatttgattcaacattaagaacgttagggttcgtatcatttgaactaaaataatgtttcagttcttctgtatttgttgttttggtagaatctctattatttgagaatctattttgatttatatcattaatttcatcttcattttcagaatcataataaggacgtggaccactaatttgaggaatttgtctaggaggtaatgcagttgattgtttgaatggatcttcgtcaataaaatcattattttctcgaccaaatggatgttcgttatcatgaattataactgaattatctgcagcatctgcatcattatctaatgataattctaattctttatttttatataatgaatctgaattatcagtttctgattcattaccattttgatgaaattgaatatcaggtattattaaaccttcatatttaagatcattagtcaatggaacagtattatcagtagtagtagtattaaacattgttggcagatttaatttttctcttgcataagtttccatattatttatatttgaattagttggggaatgattatttaataaattaggagttgatgaattatttaaattatttggattagttgtaaaatttcttgatttactaacgtcttgaaattgattattatttaatttatctaatgaatcatcagaattttgattatctctcagaggtaatgtagtatttgttgcaattgcattatgagaataagatcttgattgttttttattatgagaatttaagattttatttggtggtataaatgaaccatttgaaagatcattatttgaagataaactattaattgttgcattatttctattattcattgaaatacttctatccttttcaggtctataaacatcgaaacctgctctttccataacacttctaactcttactttagttgttaatggggggaaagcagaatgaaatttaactttgggggatttttccttcaagaaatcgggcagagtatctaagtctatttttgactggggttttttatagtatagatttgacatgatggtatatgaataaaataaagcaaaataataatagtagtagtaataatagtaataatagttgtataaaagtagtcagtggtatatgtgtatctatatgcctaaaaagaagtaagtagtaatgtaataaggaaagaagcaataatcaataccagaatcaaaatatcgacttgaaaatcccaattgaaacccaaaaacagaacctaaagtaaacactaagttaatgattcaaattccaacggtgctggtggtaaaaaaaaaatttcttttaataataaattattatattttcgcgtttctattgactttcctttatttactttattaaacgcctcgttctttattattattctgcagtttgagacgttcttattgttggagagtctataattgtttgtttccttcactaaatggattgcttaacttccaatgacgacattcttttgtaattgtaaatagataactaccaataaatataattacgtataactgtatgaaaattgtcataatcatcccaacactacaataatatagtaattgtgagagatattgataatatctaataacagtttcaacaatcatcatttcagttacatcaaattcacttgtggatgattgtggtggtggtggtgtagatgtaaatactactttagactttgattttgaattagaggcagactccaaatttaattttgtatcgattataggatcggtgagggacgtgttgcctccagtttcatcatctgaatcaaatattgattgtgtaattgattcactatcaactgtaacattatctgtattagttgcaattgtaacaactgaaattgctcttgatgccttagctggtgagttaattaaaattactggattttgtccagtacctgttgattcatctctttcagcactcattattgaattctatatcttatctataactattttatttccttttattattatatgctaatgcaataaataatgctatactatatagtaaaattatacacaaataatcaattagaaaagcgttgaaggcgaagaccaggagcagaaaagggtcaattaaagttagtaaaggccaagtttaatttttactgagccctctatagtagaaaaaagacttttttttattctcactctgattctttaaagctgagcctcttctgaaagtactgtgttgtttcttccttttgttagggagaatatgatacaacagagacagacaaaggggagaatgatgaggagttcaaatacatgttctggtaagtgacagcatatttctatggaatggttgataaattgtgaaataagttgatgacgtgaacgttgacgtgcattatcctgtattgcttgttgtatcctttgagcaaatctatgagcttcctcaatcgatgatttagatgttgagagcgcactgaatggtagtaaagtttcaaataagtgtattcgtttataatattttaaaagaatgggtgtttcagtaatgtcaaaatcaaaaggtatgttaatacctttgatgaatgaatttctctttccatacatctcaataaaacaattattcaccagtgaatgaattggatatgaattacagactatatctttaaataaaagatatttcacatttctttgaagagtttggaaaaatgttgataatgagttaaatgaagatattagatttggatcaatatttgtttctattaatggaatttcattatttattatatgatttaaatcatttgaaatattacatacaagtctgcaagtttcaaataatgttgattgatcttgaataattacaggttctaacatttgtaaaatttgaacatgttcatcagtcattgaccaatattcaaaatatgatttatcacattcatttttagtagtagtgttgttatcattatgattgacattattatcgtgagaatttaatttgttatgtgtcattttatcaacaaacaatttctgaaggatattattaacaggttcatattgtgaataagttttttctgtattttcttcattaatcattttcagattactaagatggtataatcctggatttttagatcctattccatgcattgaatctgtggaaatcatagaaagggtttctggacccttttcaaacagtgatgaacatgttgatcttgcagaagctgtgtttcttataaagttgtatttagtgtcaggttctatatctatatctatatccattgtctatgttaagaccaagaaagatgtgtggtctgtctaaaaatcaaaaaatgaaaatattaacaaaaaaaagaaaatgatctccaaagaatgaaatgaaaatggaaaatggaaaattgaaatgtcaacaaataaaacgaagaaggccgcgctgtctcttatgataagagttttgattacgttagtattgagattgttatatcttaactttacaactatagaatggtatatttatatacatacgttatggggaataaggtggtggtgatactgattactgataatgttacattgtcattatctactacttcatcaatattcaactcgtttctttgttgtcgttgatatagtttcacttttaaacgacgataaagtaacatacttaaagttgcaaatgaaagacctgtaattatgaaaacagctaaatcaatacttttcttgtaattatttttatcatcatcaccaattttccttaattgaatacccataaaaatttgaattaaatattttggtgaacaaactgtacatgcaatgaaaaatgcaattggtgataaatgtggtacacatcctaatcctccatttgttaatgaatatggtaatggacaaagtttcattaaaattaaaatgaaaatttcttgcataaatgttgtatcttcatcctttataactgatgcaaataatttaatattttcatttgattcaataatttttcttgataatcccttcaattgatatttgaaaacacataatgaaactgtagacattatacttgatgtaattagcaacaatccaaaatccttgaaatccgtaaacaattccaataattaaacataatgatgaaaatccaattaatggtgggaaacttactaaacttaataatataacaaatacaaatactcctgttgttccactctctctaatacctcctgatgcattcacaattgtttcaatgattttttgataatttataataatgagtaatgaaattgttgtatgaattataagaccacatactacaccaatcttttgcatcaaagttaatgaattaaaccatgtcttcgtacgattgattgcactgtatacatattcatttattctattccatactatacatattggaaaagaaccttgccaaaagaaagatgtaacgtgtttcaactagcttgtaacactaaaaatatttttttactatgagactaattttagttattagcattaacttttccacccagctcttctccttaggggttatggtgattcacctcttgatatatcattttagggtggataattgacaatggtaaatgtgataatacagtcgaaaagatatatacttcaatgtcgacgttggtggagattatatgccccaacaaaacgacttaatcaattactcacattgttcttgatttatttaacttatcaatgtattaaaataactattgcatcatttacatataatgaaccattgtggcatataacacgatatagaattggtgaatatttttataaaaatgatgatttacaatatttccaaaagtctgatgaatttgaatgggaattagatcatgaagatattagagatttattgaaaattgaatatttgaaaaaattaaaagtttcaggtattgattttgatcaatatttccaatctttggaattaaagaatcaagaagttgaaaaattagatttttatggattatcatttgaagattttatgttaaaatatgctaaaattattgaagaaaataaaatatcgtttccacatccggaaagaacaattactaataaaggagctccagttatttgggatacattattcgttgatgatgcatatagtcgattatctgaaaatgatttatccaaaataatggaatttgatgaaacatttcttaaagatttaaaactaaaacatgacaatatactaaaatctttaccaattgatgaaaaatgtacttattttgaaggttccggttacgttttcattggaggtggaatttacacttggtattcattattatcaatcatatcattaaggaaaacaggatcagtattaccaattgaacttattataccacatccaactgatagggattcattaatatgtgcagcaattcttccacgtgtattcaatactaaatgtgtgttgatggaagataaatactcaaaggaaacaatcaaaaaactaccaattagaggttatcaaattaaatcaatggcaatattagcttcatctttcgaaaatgtaatgtatttagattctgatgttttcagtgttgaaaatcctgattctactattcacatctgaattattcaaacagtatggaatgataacatggccagatttttggagacgtacaacatctccattattatatgatacattgaatattcaagttggtgataaaccaattagatttttaaatgattattttacaccacctgaattattatatcctgaaaaagatttaattaatgttacagaaactgttaattatcatgatttagctggaacattacccgattggtcaacagaggcaggattaatgttaattaataaaaatacacatatcaatacattattattatcactttattataatatgaatggacctgcaggttattatccattattatcacaaggtggtgcaggtgaaggtgataaagaaactcttgttttagctgcacatatattaaatgaaccttggtggcaagttaatacacaacccggtaaaacttatggtacatgggtaaaggaacgtaattggattgttgattcatgtattgttcaagttgatgcaatagaggattgggaaggtactttaggattagtttggacacaagatcattggagaaatgaaatgattgagagaggtggctatgtttataattatgattattcatttggtaaaaatggttatgattatttaaatattatgggagaggatttaaacaataagggtaacgattggataccaatgtatgaaaaaaaggaaaatcatcatactaaaccaatgttacaaaagccaagagatatgttttatcatttacatagtcctaaattagatccatggaattatgtattagataatttattcacagatttagaaggtagacaaatgcgtaattttggtgatttatgggttaaacttggatgggattttgaattatggatttgggaaactgtacgtgaattattatgtgttgataataaaaaaagtatcaatggaatatctgaaaaagatttggagctcttacaattagcagtatcacaaatgaaagcttttaatggtagaaattttgacgatatttgtaaaggtgaaggtggtagattgaatagtcggattgaatggttacgtaaggatggtattaataaattgaagaaagaaagtgaacatcttcatggttggaaattaaatggtaaagaacgtgatagagtaaaaaagatagttgatgacaaatggggtacagattctcgttcacaaaggaattaatagtagtattatttcatataacttttaaccgttgatataaccttaatgaaacgtattgtaatgttaaatattacgtaataccatactaaataatttgataactacaatcaatttaatcttaatctaacaggataagcaacttatccatttgttcttcaattgataacttcatgagtgaacaagcaccatttagaaatgcatatgagatacgacatgttcaaacaaatgcagctaaatcatgtacaatttgttataaaccaagtgatatagttttaattacagataataaaaaagattggttttatgtttgtggatcacatttaaaagataagaattttgcaaatttagtttattggaacaatgaggggaaagatgttagtagtgaatggaaggaaaaatgtcttgcagtggagaaagcaatgaaagagatgaaaaaacttgaaaagggtaatgaagttaaaagtaagagtagttggttaagttggtctaaagataaggaatctaaggatgataaagatgaaacaaaaagtgataaagagagtaataaagagaaggagaatgataaattatccgaaaaggatcagaaaagtgcagatttggctaattggaggaaggaattagcagatgctgaactgcaactgaaagaatttgaaaaaattaatacgagatatgttcttgatagtgtattttataagggaagacttatgcaagaatggaaacaacgacatgctaatgagattaaggagaagttaaataatggtacattatttcctagtttagaaggagttaaaagtctacgtaaggaagaatgataatttaatattaaatttatgttaaaactatattaattaatctataaaaactagaatatttacctatattattaatgtacacctaaaaaccctttattatatacttatgaaaacattttttcttgtttatatttagcaccctttacacctcttaccattaaatccattgtcagagttttagttgtaccatcatcatttggaatatcagcaactggaacagttttaatataagtaaaacctaatttttgataaattttcctatttcttggatgactactttcaagataaagaggagcaccaattcttggacggccagtttttgtcatatttttagtttgttgttgttgatcatattttgataaaatatcttcatcttcattataataccaagaagaatgggcagattcattatctgagaatgatgaataacctgaataatcagttaaattatcagaatctaaatcaaattggaaattaaaactttgaatttcactattaagttttgattcttcatcacttgcagatgaatttttagaatttaaaacactattattaccattaacatcaacatcatcttcatcatcttcatcatcttcttcctcctttggttgtttataattatcaacaaatttttgacaaacataatcaactaattttctagctaaacctttacctctacctctcggtattgcaccaatatcagataaataccaactataattaaaatcatcacctaaagtttcagctctatattcatctaataatttccattgttcatcgaaaacacgttttctagtttctttatcagctaaccaaacaaattttaaataaccagcttgatacatactccaaacatatgagaaaagactatgattttctgcaccttttgaatcatcaccgctatattttgattttttacttgattttgaagattttttttcaggtttccaaaaacatgcaactgctaaaaatggagcattaggatcaattaattcagcatctaaatctcgaataccaactaaaacacctgataatatagttgaataagttgcagcttcaaataatgctaaattcatttcatttttcaattttgattctttaatatctttcataagataactaatatataaatcttcagcaaatgcaatttgtaaagtacgagcagcttttttataatcttttatcgttaaaacttcaacatgtaaattttctcttgtatttaaagatacttcaggatccacagtttgttctgaagtattagtggaagtattagaagttgaacttccaaatagggtatttgttatagcagaaaacattttgggcatgatgagaagttcaaagagatgttctaagatgttaataaataaggaatacttcttctcttatatacacccaaacccttagtagtagttctatcaattcaatttaacccatttcttatcgttgatattccgcgatggagaaaattggctttcttccaccgcggtaagtcttagtttgagttatatttatgggtttattgctggttgattattatgtatttctatatcatctgtcactggttcttatctgtcatgtgtctgagtagaagtagtagggatatataatgataaggtagtagagtattttactatgaattaatgtaattgtagttgtattggagttattttacatttgagtataataatacgacgcgtcttttatggggtgttaatacctacttcatgtacttacacgatagagtagtgtctgtgtctgttccatagatcgatatatacatacggtattatacataaattatttagtaaaagaattttcataatcatattcataagtagcatttaatcatttacattgaattgatgctctaatagcaattgcaatagtttcttcaacattcttccattcttcacactctccaccacttacaacagttgtaaatgatgctccccatttatgagctaatttcttacccttatctattgcttccttattaccaatatctgtatgtgttgctaccaatactattggtgggaatgatggcataaattttccatttttatgatcgtgactatgactattattactattgttattactattatgttctcttttccataattgtttaattgatgatgaaacactatgaacatcatattcaccaccttgtttccatccttcctcatatttatcccattccttccatgcatcattaattgcattatataatgattttgcaacttctaatgattctaaattttgacaattataacataaaatatatgcatcaactgctgcatttaaatcacttatacctgatgctgtaattaatgtcagtattcttgatctaaatgatgtattatattcatttgcaagattagataaaacatcctttgataatcttgaatcaactgatctttcaagaaatggtataatatcatcacttgaaacacctggtgtatcaactaattcaattaaaactggtgttgaaattggtggtaaatatcgtaattcatcatcttcttcatcattattattattattattattattattagtcataaataaattatctgaaataccaccagggaatgatctacctgctgaattaccaaatgaatgtccaaatgaatgtcctctactaaaagttgcaattcctttggtgaatggaaactacttaatggtgaaaatctatcatcatcaaatatataaggttgtgtataatctaaatcataattaccattagttaattctaatattttcttactatcatgtttattatttattgaaccttcctttaaaagttcaattccacgtttatttataatattaagtaatttatcacttaaaattatttcaccattattaccctctgtccaaactccaacttgaagtaaatcatccaaagttacattaacatcaagtacagcccttgattctctcctctttggttgaaattgtaacagtattggtgaattacgcaatgttgggtaataattatccaatgataaattatttgcaataattgaaacaatagaagacttcccacattcaggaccccctaaaacagctattctcacgggattagttgatgttgatttaaatatattcttctgcatttgtccagtatatagataacagaagaaatatacctaataaaacaggaaccacagttatttaaataaaataaataaattcaaaatatactattaacggcctaccgttaagtaagcaatgaaaaacaaagttttgtaagcagccagccgtgtgcatgaattttaaatcttgtgaatcattaatcattagaatgcacttatcaacacaaatcaaacattcgaatagtaaggtcttagtgttctattacagtcataggatatagatagatggataggtacacagataaataccaccctctgtatgttcctgggacgtactctatatacacctcagctgtggtacgacatcagcattatattacatacaagagatataaacatttactttcagagataaataatatggaatcacctcttttaacagctaaggagagagattcattaaataagaaattaagtaaaaagaaacaatatcaattatctgattcttataattataaatataatccacgtaggaaatttgaaaatattcaagatttaaagacaaaatatggtattattttacaaccacaaccaacaaattcaattaatgatccactcaattggtcaagtaatcgtaaagcattacattttattatattacttttattaactgcatttttttcagctttatcaaatgatgcttcagctccaactgattcaattaatcaattaacttcaatttcttatgattcactgaatgattctgctggtatattgtttgttgcaattgcagtttcaacttggcttttatcacctttaaatttcttatttggtaggaaatttgtcttatttcttggatgtttatttgcattatttggatcattattatatgcattaattgaaaatgttggtgatgtatatggttcacaaattttaattggattctctcttggttcagttgatgctcatgttcaactatgtttatcatcaatttttttcagacatcaattaggttcaattataactatttataatttagcttattcattaggtacatatttaggtccaatgattgctaattttatctcatttcgtcatgattttagatgggttggatggtcaggtcttattgcatcatctattgttttagtaattgttatttttttgcttgaagaaaattcattcaattattctaaatataataataataattctgaagatataacattaaatttaggttttattcaaaagggaatattaagtaatgatgaatcaaatgatgtattattacagggttataatgatgaaaaaatggtcatattggagaagaatatcaatgtttaaaaataattttagagatattgataatgaaaaaaatggtaatccaaaaggtaattttataataacatattttaaattacttttaacaccaatttattgtttaagattcccatgttgttatttattcaggttgtataatgggattacaaaatgcaattttaacattttatttaacaacagaggatacagaattatatgatccaccatttaattattctgctaatagagttgcaataatgaatgtaccatgtataattggtagtgttattggatgtttatatgcaggttcattaactgattattttattctttggattgcaaggaaaaaagatggaattgttgaaagtgaatatagattatattttgcatttgtatcaggattaattggtgcaattggattattaatgtttggaatggggattccaagaaatttatcatcaggtgttttctatgttggattagcatttatttcatatatgttttcatcatcaaataatttagcaatgttatatattatggatacatatcgtgatttaatgttagaatgtttagttgcagctaattttattaataatataattggatgtatatttacatttgcatgttcaccatggcttgaatcatcaggtattgaaaatacttatattgctttagccgttataacacttgcagtgatgggatttgctggtgttttcattaaatacggtaaaacttggagaaaatactccaatgtatactatgtgagtctaattgattcacgacagaaacttttgtaatctatataataattaatgtacaataaaataaaagataaaataaaataaataaccgttttacatcaaaatagcttctcggggttcaataaagaggttcggccgacgtaatgaaattttctccaattacctcaatttggaatgtccgacatcccctattgttatactatcgtgtataatttattattgttgtcacttgttgtcagattggtaatagacattgtataaataacagctatatacccaccttttgacattgatattagaaaggaaaaaatgtctaggaagaaaggtaagtgtgttggaatacatggtagaatgactgatagtgaaaggacatcacttttgattaatgaaactgttcaaaatacacagaaaacttattcatcaccaactgagagttatacatcagaacaaacatttcatgaagttgtcattcctgaaaacttaactaaaattattgcttctctatggttaggtacattcctctcagcggcagatacaacaattgtttcaacaactgcaaatactattgcaagttcaatgaatggttcagataaacttgcatggattgcaacttcatatcttattacaaacacaatttttcagcctttagtaggtagatttagtgatgttttcggacgtcgtactgtgttattggtagcacagttttggtttgccctagggtgtctttgttgtgcattatctactacagttactcaattttcaatttcaagagctcttgctggtattggaggtggtggaatgtctgcattaagttcaattataacaacagatattataccattaagatcaagaggtatgtttcaaggttatgctaatttaatgtatggagttggacaatttacaggtccaattttaggttcagcatttttaacttggaatgaagaatcaggttggagatggatgtttgcagtacaagttccaatggttattatagctggttattttgttcatgttaatgttcatgaatatagacaagatcaacttactgaagttgatatgaatagtagatttgcatgggaaaatttatcacaaattgatttacctggttcattcttattaagttgtgcaatcgtttcaatgctaatgatgtttaatgttagtactgtacaaaatttttggatctgtggtggttgctttattgccagctctgtatcttttgcattaattgaaaaatatgtcatgaaagttcatataatacctccatctgcatttaaaggtgttttaagaataactgcattaattattgcatttggtgcagcttcaatttatgcaatgaattatatattaccaatttatttacaaattgttcatgatttttcacaatttcaattaggttgctttaattcatttagtgtttttgcaacatcagcaggttctctgattgctggttggtaccttaaacatgatgatgaaaatgttcatgcatctgttattgttaaacgtggtattaatttatctataatatgttgtcttgcagttgctactggtgtcactatttgtatgattacatcaatgaatttaaaaccaactgaaaatagatctgatattgatttaactgtttattgtaaaattggtattttattaattggttcaattatttcatcaattggttatggtgcatttttagttgcattacttattttagttgttggtattgttggtgtgaaacaacaagcaactgttaccggtatgaattatatgttccgttcaatgggacaaagttcaggtgttggtatcacacttggtctttataatcataatttaattaatgatttaacacattattttattaaaaaggctaaaccagatggtgatattattttacaaaatttgaaaaattcaacctattatattcgtgatggtctacctaataaatatttacataaagtgttgaaaatttatagagaatcagttagtgatgcaatgattttagtattcttgttagctgcatttgctttcctattaagtttgatcttaaatattcacaataaacaagaagatggggagatcagtagaaacagaaatatttcacatgtttaagaggcatgaggtcacattattatatagattgtattccaaattgtattttaaagaaactattattcaaacattatctttatgaaataacaacttgtaaaattcgccaacatcactatctaggatattgaatccatcaattttttcaaagatatcagtaaattcatcattatcaaaaaccgtataatcttccctcagaaatgctaagcagataactcctctataaagttcatatttatctattgatccaagttttaatccccataatgataatgcgcctatcattccctttgaaactaaatctgttggtaatcctccataaccagtgcccaaacctggtaaaataatattatctattttcccatgtatatcattttcaaaaccttcttgatttttttcgttgtgtcttgaaacagcacacattatttcccaaacacaagtcaaacacaaatctaacaatttctaaatgcttcactcggatggtatcaatagaatcttctttaagaacagtatatattgattttggtacacgcatagttggtattaccactattgaattagctctaaatcttttccaagcaactgattccttaaaattagggaaatcatgaaattcaagaatatgtgcagtacccaatggtgtataaccgtgtctcaaatgtttccgtataaaagtttcaattgatgccaactttgtttccttcccgacatttgttgtatataattcacataaagcttcatcaaaaccaccgcccattccaccaatactgttagctggtgaaacaattgtagtctttctattgttctcatgaataggatttaatgatgataatgttccctgatgaacttcaatcgacactgttgacttcaactgaccattatatttcaaaattgactgaatctgtttgttccatgcatttaccagtaaaggattgctatctaccagcactatcttcaaatgattcattaatcaattcattgaaagaacatgacatcacctcatcaatttaatattgtggagcatgaaaaattatgtttcggctctcaaccattcccaccaagccccctcctctccatttcttcttcttcttcttcttgatttaatctctgtttcatatatatttacttcttatttgtagtcaattagaacaagaaaacaaaaaaaacaaaggaaatatgtttgataataatgtggaagggtttaatatttgccaaaaaatgtggtatcagttttggaatccatcaattggaagttttacaactcaaacaccatgtcatgaatctcatggaaatcaattctcatgttatgcacaagcagttgcagttcatgcaattggagattcagcgacagtttttaaagatatgacattaccaattgttgataaagtcgtaaaatcaactttaaaatatagaaatccaaaatatggtgcttattcagttgatttccatggtggtgaaaactccggtaatgatgatataaattatgatgataatgcacatcttttaaggggtttaatccaaatttatgaagcaactggtaatgaaaaatatttaaaatttatgtagtgaaatacaaaaatttatgctaacaggtattactgaacataaacattggcatattaagggatgtaaatggcatatttcaagatcttatatggcaacaatttctaattccgttggtgcaatgggtgcaatgaaaatgattaaatatacaaataataaacaagatgaagctaggcttatatgattttgcaaaaacattgtatgaacttcatttgggagaagatgcgtgatccaaatgataatattataatggatggtgttggacttgattcggagacaattgatataaccaaatatagttataatcaaggctcatcacttagtgcgtattgttatatgtatcaatatgatcaaaatcctgaatggaaggaaaaggctgatttattaattgatggatgtataaatccaggtaaaactctttatgatcgtgattatccagatcataataaaagatatttacatggtattgtttattttaatcaattattaattgaaggaattgttgattatattttaacatttaaagacattgcacctccagaagttattgaacaatgtaagaaatcagttagtaagacatgcttcatattataggaaatattgttttgatgaaaaggatggattatattttatgaattttgatatttataaaattcaattcacacatttataagagatacagagaagaatttggtggtaataaaccatataatcctgataaaagaggagagacttgcctgctaaggatgatggaaatattgatagattacccgtggtgaagagtttaattggtgaagcagctgctgctcatatgtttttccaaattgctagagtttttccacaaatggaacctgttaagtgttagttagttttatttattttgatttattttatgataattaatagtttacagagagtctatttaatgatttgaacattttctatatatatatagctttcaaactgaatatttatttaatttaaatgctggtggatttggtatatcttcaagatgtctttcaacaacaacaaactctgaatcacttaatttaccagcaaataataaatctgtgtagttttttagtaaaccaaaaacatttattttcttcagttgaagaagcagatgtagttgctgttattttagaaggtgaattaatgacacttttaccatttcttgaacgttttttattatcaattatattagatggttttaaagaaggtaagtcataacttgtatcaaacatacaaaaccaattagaaccataaacacataaacgtcctaaattttcaaagataccaaatgcataaccttgtaatgaaagaaattgtgcaggcattgaatttgaatttttcattgaccatggagtataaatttgaccattttgcttcttatttaaaacatcaaattcatgtactttatgatctaatgttacagctaaaagtgttgaatgacttgaaaatgatatacatgttgcaattgatgaaagtttgactaatttataactttcatttgatacaaggtctaaaatatcaattgtaccatcatatttagagagtgcaactaatgatttattttcatcaattgcaatatgtgtataatatgataaatattcaaaatttgaacttgaattagatgattcatcttcaggtagatcaaattcgattggatcttgattatcatcaattggagcagatggtgataattgatcaaatttaagacctaataattcattttcggatgtgtagattaaaattaaatcttgactgttgacaaatttagattgtttagcaccaatagctgataataaatcagaattactcttttcgattaaaattttattttcagattcttcaactaaatggaaaagtttacaagtgataatcttgatacaagtaaatattcaccatttgaacttatatcaacatttgttatattttcaggatctgtaagaatcattttagcaactaatttctttgaattatcattctttaatctccatattttaatttcattcttttgccacatgattattaatcttttctccttatggaattattatattaccaatgagaggattgattggtaatttgattgaaactgaactttggaaattcacaattgaatttatatgcataattctctcaatacccccactaactaagaaatctaaattcttaggattggtaacaagtcattgctctaatatcattaccatgtaataatctatttgacatattaatccatttataattatttttagatattttagtataatcaaaattgtaaatttttctatcgacaccagcagtgaaaaatctttcaccagatgcatccttagctaaacataagacatcagccttcatgaatttggaaagattgttgtaaaactaaatgttttaagtcccaaattttaacagaacctgttgaatcaccagatacaaattgatttgattttggtaaatataacaaactccaaattaaacttggttcacttttagctttatcaattcttaaagtttgaatcaatctacccttaagatgagagatttcattattattattaggttgatatagaatcatcaatttgactattatcatcattgtcattattattactgttattattattattattattattattattattattactaatttctaaatcattatcattagaataagcccaacatctaattctaccatctgcacaaccacctaaaatcattttattttttatccaacaaagagataaaactctatatttttgtctttgaagaattgtttcatgttcaataacacctggaccaccatttatatcaacaattacaactgaaccatcatcacaacctaaagcaattttatcatgatttgaattaattgaaattgaccatattaaacctgcattacaatcaaaatttttcaatggaacaccatgttgataaattccattcagttaaaattgttgaaccaccaattgaaaataaacgtggtggtaatgaaggatcattatttgatgaccaaactaaaccttcaattgaaatatctttagagcctggaattattgtctctaaaacccattttgaacgtgaattatatggattccatatttcaattgtaccatcagctctaccaattgctaatctaaaattttttggagtaatttcatttaaatttgattcatgagtgaatgcacatgatgtgatagattcaggtgtataatctacaaatgaacaacgatgaatatccatggttagtcttagtgatggttgattatttcagtaggtacacacaaacaaacttttattgttaaattcaagattaatgaaaaattttggttgaataaatcaaaaaaaaatttagtagattgaaatatttttaaacaaaaaaaaatatttttgattatgtaatataaaataaaaaataaaaaaaacttaaacaatttttaatgggaaacaccccttcttatttatggggtcaactgggaattgaacccagggcctcctgcacccaaagcaggaatcataccactagaccattaaccctagtaaaataaaggcggttaacccaaattgtttaagaattgtccctccggccgggatcgaaccagcgacctcaagatgtcttgtatgctgttttagcctattacagtctcgcgctcttccaactgagctacagagggtttctatgatgactggaaatggatgattattctcggtgttaagattttaaggtcacgtgattttttatataacgactattaaacagaatttaaaatttataaataaacattctttgacattattaatctcacattcattacaaggaattattaatgttatgatcagaaatcattatgcataccattgttattatagatatgccgaaaattacatattatcaaatagagctgtacctggaaatttaccaaaaataaaaataccaggcactatttcaaatggattaatttcaacatatccgttcaatctcttctgcataaaaatcataaaatatagggaagtaatattactattgaagaaactctttcaaatgaaatgtcaaaggttgcaaaacctaaaataataaatataaatacagggaaaataataatcgatcttgaaccaaatatcaatttgattatcgaacaccctgtgaattacaacatggatgaagcttcttcaaaaacattagcaccattaatggtgtactctaatattttcccatatttacaaggatggtattagttgactaacattcactcagattttcaggttaaagaaattacagatttcaatacaacatcgttattttcaatggtggaaaaaaatgttcaaaaatggaaaattgtagaaattttcaataaaaatcaggaaatcaatattgaatcatttaaacatttttcaaaaagattttacaaagaagaatttaaggataaatttaattcagattattgggatggtaaaatagaaaaccaattggattgggaagcatgctttggttggttgggtagaatcaccaatcaaaaccatgttgattttaatgaattatttgaattacaaacaggaatgttgaattcccatttttatcacccttgccaattctgcgaaggggaaggtgggactcatcatgtctttttcaactgtaaaggaattgaaataattctaaatgaattagagataaaaattgatctaaagaatattgttggtttaatatcaacaaagaaagatgcttataaagcaaacataataatcaagttaattatattttttaacaaacaatgctacaaaagcaataagaatgatccagagtttaggataacaaaaagatatattaaagatacatatttgctattcaaatatgaaaaatttagttcttattagatctaaattagaagaaaaaggttaaagaataacctagtagaaataatttacattgagttcagtatatgaagatatattgaattgatgaagcatgaataatatatgcgtataagtaatcaatctgtataaaattgtatatttttgtagcaatcaaagtaaaattttaagggttacattgcccttattaatgtatatgcacaattaaagttattaacaatgataaaggttatcacattgatttctctttctttaatgatacaatttaaaagagttttaggtattttaccaatttagtaacttatacagttacatttacaatacatacattactattacacctgaatatcaatctcatgatgatgaaaaagatggggtctaaaaaaataaaaaatccggtttaaaatcggttttttaaaaaatagctgaattcccgagaggttttcaaatggaccctttttattgatgggtttaagatgaaaagatgttagtttaattataaacttgaataaagaagagggagtactaaaagaacactctaaactagagttgagttgcgtattgaatagatgtcaataatagggtttataaaagtttaaaagtttaaaagtttaaacccttcctataattgagttattttaaacggatttacaaacttaataatttcatcccactattttatagagatctatcaagacctaaataaatttaaatattcagttaggttttctaatctttttttattactctttcttttactcattactctatacagaacaaggatgtccgattcaaaagttatagttattactggtgcttcacgtggtatgggtaaaaccatgtcagaaattatccttgaaagatcagaaactgctaaaattgttatggttgcaaggatcagaggataaattaaaggaatttttacgatttattaccagaaaaagatcaaaaacgtgttcattatattgcaggtgatttaactgatgattcaacaagtgataaaattattaatgaaacaattgaaaaatttggtaaaattaattcagttattttcaatgcaggtattttagaaccaatttcacatattgataaacttgatacaaaattaatgagaagattatttgaagttaattttttttcaattgttgaattaacacaaaaattaattccattattaagagaatcagctcaaaatgatggattcccatcatcatgtatttatgtttcatcaagtgcaagtgaacattgttatgatggttggttagcatatggtgcaagtaaagcatcagttaatcatttagcaatggatttaaatagtgaagaatttaatgtaattagaactgcaagtattgatccaggtattgttgatactggtatgcaagttaatattagagaaaatttaggtacaggtatgaaagatgaagctcatcaaatgtttttagaattacatgaaaatggtaaattattaaaacctgaagttccaggtggtgtttgtgctttacttgcattaaatggtattccacaagaaattagtggtaaatatttagaatattgtgataaatctttagatgctttccaatattaaacttataaatctgtaagtgttatatagattagatatagtatatgaaatcgatgattattgttaacagtattaacattttaattatgcctgtgattacataatcaaatattcaatcttattcaattaatgccatggataatgagtttaatattttactctacagcagcttctttgctcttgacaatgagtcaacttgagaataaaacaattatcgtcactggtgcatcacagggattaggtaaatgtattgttgaaaatattttaaataattatactcatactaatgttgtattagttgcaagaaatgaagaattattgaaatcattttataattcattaccaaaagataaacaatcaagatcattgattgttgttggtgatgttacagactctaatacgattattaaaacaattgatgaaacattaaataaatttggtaaaattgattcagtcattttcaatgcaggtataattgaaccagttggacatttaaatgaatcaaattataatattgatagtatgaagaaattatttgatattaattattttagtatagttgaatttattaataaattacttacaacaattccaaataaatctccaatcaatttaatatttgtttcatcaggtgcaagcacaagaggtattgatggatggttagcatatggatcatccaaggcagcagttaatcaactttgtaaacaattaaatgatgaaatgttcccaatagttagatgtattagtattgcaccaggagttgttaatacaccaatgcagaaaaccatacgtgaaaaatttagtgataagatgacaactaagagtcatgaaaggtttattaatttacataagaataatgaattacttgatggaatggttgttggtaaagtttatggaaggttagcagttgaaggtatacctgagaatgtatgtggtgaatacattagatggaatgaattgtagtatagtatagtacagtacagtacagtacagtacagtagattatgtgtaattagaataaaataaccttgttagatgtgtgataacgatgacctcgtgttgtatcataggtgtaatcaatcaatcaatcaatcattgtacaaaaggtaccactatagtaacaaatgagcaattaaagctcggagtaaataaataaggataagcttaaatttgctcatgattaaccatggtggtttaattttcacattgtgtttaattactcttggtattgtattattgtataaaagtagaggggtatcccccataatatgactaattatgcttatgaagttgtaaaatagtagtatatattgttttattattaacaattaacaatggaatcatataacggagttttatatagtaaatcagatgcattttatttaattgaagcagcaagaaataatattataccattaataaagcaaagattatcagcatttgagagacaagcaagtattaaatcgggatcagttttcatttggaatgaaaagaattcaaatattaaaagatggacagatggacgtaaatggtcagcatcgagagttactggtacatttttaacatataaagaaatgaaaccaccatcaattaaggaacaatcatgtcatataattgattataaagataatggacttttaaaacaatcatttagttataatattggtaatgataaatatcatattgttagttatattaatgaaaatgataattcaattaaattacaacgtccatcacatgatattagatttaaaagtttatcaataatttcatatattgacgaagttattggatgtcaaccaatttatagttcaaaatgtaagggtaaatgtaaaaatttgaataaagatcataaatgtgaaattgaatgtgaaattgaggaagatgaggagttgactggttcatcatcatcaacatcatcatcagctagatcatcaatttcaaccagttcaagtgagataactgtttcatcacctaaaacaattgattattcatcaagtttagaatctgttactgattcagagaataatgataatactaaggataatgattataataataatggaaagaaaaatgatgacaaaagaccaacattaccaccattttcatcaattgaatcaattaaatcaattccaagaactgcaccaacattagctaatgtattaaataataaacttgttaatccattaccattaccaatcaatatgaatatgaatatgaataatatgacaatgccaatgaatatgaatatgaatatgaatatttcaagaacaagatctattagtagtataacaccatcagctaaacgtgcacgtattatgtagtattatacaacaatatataactactctttgtattttaatctatataccagtataaccgtttctagaacatcctctttatgcaaagaactacaccaatagcatagccaataatactctatatcatttattatactcccagaaattgtgcgggggtatcaggagttttagttgggtatttaattagagtggtagcagctcctttttcattatgtactatcttctttatttatagttctttctgtagacagatatacaatgtttaacggtaaatctactatcatcacaggtgctaataagaatttaggtaaacaaactgcaattgcatttgccaaagaaggttcaaatattttattacattatcattcaccatcatctgctgatgaaactgaacaattagctaaattattaattaatgattataatgttaaggcaattacttatagtggtgatttatcacaagaggattcaacaattgaattatttgaaactgcaattaaagaatttggtaaaattgattatgcaattaataatgttggtatggttcttaggaaaccattatattcaacttcattagatgaatataataaaatgtttgatattaatgttaagacatcatttttatttttaaaatatgctgaattaaaattatctgaaaaaggttcagttgttatgttaacaacttctttattaggtgcttatactgatggttattcattatatcaaggtgcaaaatctgctgtttattggatgtgtaaaactgcttctaaggaaactcaaaagaaaattacttataattgtatttcacctggtccaatggatacaccatttctttatggtcaagaaaatgaacatagaattgaatttttcaaaactcaagcagttgaacaaagattaactgctgttgaagatattgttccaattataaaatttattgttaaagatggtaaatggatgacaggtcaaaacttatatgcaaataatgggtttacagctccatctgcataatttactctattaccctacaatttaacttttataatccttttataatccttttatttcatttcatttcatttcattaatcaattcaattcaatacaaatagcaaccacagcatatagcatatagcatatagcagaaactacctctcccagtaattataaagatctctctctattacccttttcgtcactctattcattgaccgtcgcgtctgtagggtttttcattctatttttgttatttccatatttatcactactgtaaatacatgattatttgatcttgaatagtggtatatagcatatttatatatttatatcaataaatacaccaattgatcgttactgattggtagaaatggactttgcatatgaagtagatacttttgataataattctaaatcaaattcttcaatttctcaatcaaatagtgtatctttaaaattatcttcactttcaacggcggattttacaaaacgtttacaatcattatctttattaggtggttcatatttaaaatctaataatgataataaagagaacaataataattcatcaaataaatcattatcttcaaatgcaaaatcttttaaaagagctaaaaattcaattgagttattaaattcattagacgtaaattattcatttattaattcatcttctataaataataatgatagttatattgatttgaatgatactactataatacaaagtaaaaatttaaatggtacagttttagttgataaacttaataatatacttgaaagtcaagatggttatgatgcttcaattaaaaattctttatctgtattagaatcaagaattgaaaatgaaattataatctcaaaaatcagtgaataataataataatactactatggaaaaaactttcactttacaaaacttaacatctgttggtactaaaggtgaccttatcaagaagaaatctaagaggtttaattgaagatgatttaataaatcaatatacatctcaattaaaatcttttaaaaaaattgttgacttattggaaaatttaaatcctaaaattcaacttgtaaataatgaatataatgatttaatcaatcaaattaattactcaattgataattctaaaagtattaaaaatgatatatctcaattagagaaaaagaagaaacaaatagagataaagaaaaatattttaatggcatttaaatcaacttttacaatatctcaatatgaggaacatttaattagatatgctgatcttaatgatgcaacaaatagtatggaatttttcacagttattgataaaattaaaaatattcaaaataattcagatgttttattaggtatggaaaatgaaaaattaggtttaaaaattatgaatcaaatgaataatttacaattaattataaatgaaagaattatttcatatgtccaaaaaaatattgattatgtatattcaggtaattcatatgataataatttaacgaagaatattaatttcccaatatttccaaaaattcttaatttatctttggaaaaataataaagaaaattttaatttaataatggaaaaaatgacagaaactcgtagtagatcaataagtaatgaatttattaataaattaaaaggttattctgatgaaattaatgctcatgatcaattatctacaaataaaaattttaaaaataattcattatatttatcatcttatgataccgttagatttatatctgatacattagcatatgttcatagtttacttgttaatgaaatggaaaatgcaaaatcattttttcaattttgatttttcattaggatgaagataataatgatcaatcatttgatcaaaatgggaaaattgaatttagtaatatgattggtgaaatagtaataaatatagtatctggattaaataattcattgaaaagttcagttgaacatattttacgtcaagagagtaaattatcgacattagtcaattcatttgaattgattgaattatattctttaatgtatcataaacttttatattcaaatgataataaaagtactgagattaatgatggattatcaaatacaatggaatatttgaaaattgaaactcaagatcgtatattctttattataaaacttaaattaaagaaaagttgaagctgaaattttagatgaaaataataatgataataataaatataataacattttagatgatactgatataattcctgattggatagttgaatggtgtacaattattgatgaattattagggccattatcatctcaaaaatatgatgataataataataatgataaacatgcaattggattaaatgatgaaaagtggaatttacttttggaattattagttaataaacctattgaaataatggataaagttaaaagtaaatcaagtaatgataaaaaacagagattaatatggaatcttaattgtactgattatcttttagataaagttgactataaatccattattatcaacaaaatctcaatttttgaaaatcaattattgataaaaatactaatgaattaattaatttagaatttacaggattactgaaaagttcaggattatttgatatttataatttagttaatatgattttcaaattagatgatgaatttttcgatgtttcattttatcaaccaattttagagaataaacttttcaatattacaacatttcaaattgctaattcgaaattagaagaattttttgcaaattatattaatcaaaatgaacttaatggtttaatgtcacctaaaatatttaataaagttttctttgactcatcaatgaaatttattgatttttataataaattatcattaattgttaaagaatatttaagagattctaatgataatgaaattaaagttttccaatgggatgatattacaattgctacattattaggtatcgaagaatattatcaacaacaattagaccagtaaaatgtatattatatataaaccatattatagagaaaattataaacatttctttacgtacgtacaggttgttgacctctaccataacctttactttcataataatccattggataaaaatcttcattaaattctttatcatcacccattaaaaccattgcttcatatggtgttaataaaggtttattaaatgcataaccccaatctatactcaatcttggacatgcgacttgaacaaatgcatcaatatcatcaaacattgccattttttgtgggaaaatttcacttaaaacaattttaacaactgatttaccattagctttcaatttttcttctaaattagcaacagttactggattaccttgtctacctaatgcacctaaaattataccaaattttttggcatctttagatatatcaattgcttgttgacgtatttcaaccatttgtttcttatcatatccttctcttgtaaattttcttgaatatggatcatatctataggcaggtacttttggattatgaatcattgcagattctaaatgaaatctaccatcaccaatataaatcattgcatcaaattgttcaggatctaaatatgcacttgtacatcctaaaacttcaccctttgataaaggtttaatttgtggtgtataacaataaattaatttttcattatttgaatcatcacttaattttgcacgtatactatgaattgatggattaaattgaattgtaccaaataatgcaattcttgaaccttgatcaaaatttaatctaattgtattaattaaatgagttttcatcaattgcaattgtaacgaaaacgtataaaactttaattaatgtaatatcaattggtacaagacatgaatgtgcataatgaactataaaatcacaatctaatgctctagctgtataatcatcaatacaacatgcaccataactaacatctcccataattaaagtttcacatgaacaaaattcttgtaaaatatctgcaattattggtgcataaattaataaaccttcaggcatttgaagacaaactctctttgcatttctttgtttaatattgaaaactgttttatgaatttcaaaattataatttgatggtaataactttattgcttcattaagttgttcattatttagtatttcatcaggtatttgattaattaatcttgaaataactctagattttctagctctgacaacagttttagatgatgcatctgtgttttcagtctctgtagttttcttagcacctccaaatcttgatcttctaggctgtaccggtgttgtttccattatgtttgatacaataagaaacgacaccgattttaatcattaaagttgaaaaaaatattttttttcatgttaaatttttttttcaaatcaatgtcattagatcaggtatatatgctttatctttctattaacaagacatatataccatgcttacaccacgttttgaactagatcaagatgatgattttgtctatattaaagttcatattgctaatataagattttcagcagctgcaattgaaatggttgttaatgataacgtttttgtattttcattaccaccatattacttacgtttaagattccctaaatcacttgttgaaaatgaagatgcacattctgaatttgttcctaaagaagaatgcatcaaaatacgtgtaccaaaacttaataagggagagtttttcccagatttagatttaagtgctaagttattagctagaatgaatgaaccaagtatcgatgataaacaaaaaaaagtttcaatgattgaagaaatggatgttagtaatgataacattgaaagtgttaagaatattggacaagagggacaagattttgattgggaaatatcccaacaattaccaccaataatgactgatttacaaaaatcagttaaatatggttttaacaacgaattttcagattatttaacaccatcattaagtaatggtaatgatataaatgaattatcagatcctgatcatctacaaccagatgatagaattatggaaagattaattaaggagaatatcaaatttgatatggaatattatgcaaatgattatattaatatgaaatatcttgtagatactgaaatgggtgatgatggtattcaaaatgcaattaaatttatatcaccatttactaaaattttcaatgaaagtaaatcgaaaaataatgttgaaattgaatttacacaacaagaaaaagatcaaatgaatgatttaccacgtaaaacatttttaattgatgatccaagaccattatattatacaatattatgtattttatttgcatatagttatgaaagaagatcatttaatggtgatttaaatacagaatctgcttggactattggtaaacttacaccacagataagttgtttagattcacaattaattcaaagtaataatgaaactgagaaaaatgttattaaaattattgttttaacaatggctagaagagcattaggtttcccattatatagacattatgatttgattattaaatcatggttagatgtttattggatattaagatgtggtaaaagaggtgttttaaaagctttattagaagttagagaattatttagaaaacatgatgtttattatgtttattgtaaaatattatttgataatctatgttcatgggtattaagggatggatgtaatgataatgttttaagaaatctttcacatgcattaaagaaagaagttgaaaatttatcaaagaaagatatagtatttgaaaaaattatacgagatgaaactgtgggaaactgatgaaggtaatcgaaaaggatgaaaattttgaatttttgaatcttgaagatattgaagaattagcagatgaagcttatcaacaaagtttatagataatagatgaatgaacgaccgatattaaaatataaaaggtaaaagtgtaaaggataaaagatatataaacgagtgtaaaataatatacgtgtaaaaatatatgaaaaagaacgactagcctaaggagttttaggttcataatcaataactaatttttgatgaatcggagatacaaaacttgaagtatttgctgtgctagataagttcataaccgaatcatcatcagttgtaactccatcatctgatgttattgaaacaacttcctttaatggagatcctaaatgttttctaagttcattgttaattaaagttttgtttttctttctatgataggtattaatacttgaactattaacacctaaaagtttttcaacatcttcagtttcttcatttgaagagggagaactattactcttattattgattaattgatttctatattgatcttccaggcttgaaattttatctaagtctatatccatagtcctgtaagattcattaaaattattttgattttgttttatataactaccattattatgaaattccatttgttcatattcaggaatggatactgttgaaggtaaagataaagttctttgatgacttaaaccatgacggaaattacttaaattgattgatttcctattacgagtatttctacttaacgaagaaactgcatgagcaccaattcttgaaggtgataattgatgttttggtggtagtaaggttttttttctttgtaatttagagacagtatctgaattaccaccaaatttaaaattagtcatcaaactaagttgttcttgctgtgtatcttgattatttgaatttgaatttaaatttgaattaggtgggaatgtgaaagagttaggatttccactattgcttaactcagaaatgttagaaatagttctatttcttctatgatgattagcccgtacaggtgaaggagaatttgaaggagagtatggactgttcgattgaggtggagttgaaaatgcgttattttgattaacgttagcattattattattattattattattattattattcaatgaggatgatactggattatcattattaaattgtgattgagattgattttcagataaatcattaaaaagttttggaatcaaatgacctggaaccttagaaattgcagccaatttcattaattcaattgatctatttaatttttcaactttataatattcttgtttagttttttcttgagatatacgtaattcaagagctttttgaagtgtttgctcagaatatggccattcagttaattttgtaccaaataacactttaaataaattctccattgttgaaaaagctgtagatgaagaattcgatttcattgaaggatctgctttggaatatgatgtatccatttgacaggggttttcagttttactactttgagtattattatttaaagaaaaatctttttgaaaattagaatgagaatgaggattatcttgacgatctaattctgcactatttatattatgcatactcctttgtctattataggatgtcatatgtaaatttttatcagggtgccttagatttggaacaggggaggatgaatgataagttgtacttacaactgtctctgaatccaaattagggaacttgaacattcaagtaatagcttggtagatgaatatggctgttacctgcaccaaaacagggggaataggggagaaacaaagaagagaaggggggaacaataagaacaaatcagtgtaacaacaactttaaaatagacgtaataacttaaattatcaataggattacccaattgggaaatattttttgcagttacctaattgggtgaaaagataaacaaacaaatcaaaacggtagacgcgtctatcacgtggacttgcgacgcgtctctttttaatttttaattaaatattttttacgcgtcttcatttcaattacagccttataatactgcataataagagaattttccagtgaaacttttggtggctggaatggtgtataatcattacgttatacatatcaattaacaataaataagcaatgtccattgtatcgttattaggaataaaggtttctaagtaatcctgctaaatttactgatccatatgaatttgaaatcacctttgaatgtttagaacaattaaaggatgatttagaatggaaattaacttatgttggatcttctagatctttagaacatgatcaagaattagattcattacttgttggtcctgttccagttggtatcaataaattcatacttactgctgatgctccatcacctgaattaatcccggcaaatgaattagttagtgttacagttattttattaagttgttcatataaggaaagagaatttgtacgtgttggttattatgttaataatgaatatgattctgaggaattaagggaaaatcctcctgctaaagttcaagttgatcatattgttcgaaatattttagccgaaaagccaagagttactagatttaatattgcttgggataatgaagataatgttgatgattatccacctgttgaaactaatggtttagatggtgatgatgataatgaagaagaaatattagatgatgatgatgaaattatagatatgggtgttaatgcaaaagatgaagagatgaagaaggagagaagaagatgatgaagaagtagtagatgaagattctaaagctgaatctgctaacagacaaaatactattaatgatgatgatatacctgaattgaggaaaagaaaattagaaaatggcgatgaagaagatgcacaaataacaaagaaggcagatacaaaagaagaagaagaagataagacagcagtggaggaagaagaagtagatgaagaggaagaagaagatcttgatgaattagaagcggaagatgaggaagaattagaggaagaagaagatgatgaagatgaagatgacgaggaagtagatgaggaagaagaggtagaggaagaattagcagaggaagcacaaaatgaacaagaattacaagaagaggaagaaggtgatgaagaaatagaacatactgaagatttagatggtgatgataatgataatgttgaaacaccattagattcaacagaaggtaatgaaacacctaaaatttcagaaagtacagctacaactcctgataattaaaactgttagaattacaataaattaagttttactatactaaacattaatctttttcaacatatatcgatgtatttttataattttctttaaaatatccatgtatttatacaatttctatattacaaattattgatcattttcaaaagcttgatttatgatttgaaaaacatgagtaacttccttttccatttcattatcccatattccaaatctttgaagtcgatgtttcatcttatcgggatgccatcgtatacgttcacgtctcatgttaaggtgtgttttcaaaaactctttcacattgtctttatttagatcatcaatattattactatgaatagggagaggtatagaatcatatccaattccttgctcgatctcattccaaatggaaagatatcttctgtaatcgtatgtagttggatcactttcctcttcggaagtataatctatttcacatgattcttcacttgatgtatcatagtattcatcaggcttttgttcttcttcaaattttttaacctcttctttatcaaatgcaagaaacttatatccatcttcaccttctccgtattcataaatgatccttggtcttttgaatgacatattctttaatggtttattagtttctataccttccacatctttattatcttgatggtcaccagaagccaaactaaatttctcctccttctctttcttaaagaacaaccttttactcttgaagtgcttaatatcttcactttgcttatcatccgttgcacattcttcaacactatgtaacttagggattgaaacctctgttttttcttcttccttttccttctttattctttttggcttaaatcttatccttcggcccctaaggaaattcaaagttatcatcactctcctttgaacccgatgtttccatgtagacctaaaaggaaaagaagttaactgtttatctgacactattatctgtggctgtgcttggtaacatgagttttctattatgtcatgaaaattaaatttcactgtcttgcaaataaaaaaatttatttaaaaatttcagattacaatacttgattttcttattggttatttaccaaccaactagagtcaacttaaatagtaaaatctaatatttgaaaatgctcagatcgtttatacgaactggttcaaaaaagaactttttaagaagtcaaacaatcatacaaaatatcagattgaattcaacaggtaattcaaatcctaaaattacgatagaagatccagattttatctatgaatcaactaatccaatttcaacagaatctacacaattaaattttgcatatagagcatcaggagaaacatttggtcaacttgttcaagaagttcatcatgatagagatccattacataacagtagagttatcactgcggaggaggcattagagggtctagatccaagatttcgtgatcctgaaactggtgaatatttagaaggtgcaacatcaaaagatgcaagattagatccagaaactttatgggggcgtgttaatcaaaagcaaatacgtgtacctgaagaatttgcaagtgttatacaaaataatttattgtttcaatatgatcctaaagctttaaaagaacatgttgctcaatggtatactaatattaatgaaacaggtattagagagaaatgtgattctgaattatctgcagatgtttctattgctgcatcatttgctcaagattatgcctgttcatatcaagttattgatgaatttattaaaagaattggtaaggaaaatgtgaggcgaatgttaatagtattttagatgttggttatggaccatctgttggaatgcttcgcactcaatgagttaatgggagaggattggaatcctccaagaaaagattctgttgtttacggtgattatcatatgattagaagatctaaaattatgttaagtagacaagttaatgaaaattatccaagacattctgatcaagaaacacaccaagaagaatctttgagtgatattgcaaaggaaaatgatgatcagaaaattatcagctaaaaaagctaaacaacaggcagaagaggaagacgaatttgtagatgaaattgaaaaaagctttgttcaaaatcatgatgaaaatttgatgggtaaggttaaaaccaagaatattaaagttaaaactgttttattagacaaactagcgtcctgtcactgtcaaatatgatttaattatcatatcttaccaattattgaaatcattagaaaactttcctttccaagtcgatgcacttctagaaaattacgttagacgtttgaatccagatggtcatttgattataattgaaagaggaactcctttaggatctgaaatagttcgcaagagctagacaagtcattttaagaccagaaaaatatgaaggtcaaactgataaattcccaagaccatttaagagttctgccaagaaactttctgcaagagatcaattaagactatccaaattatcaccagaggaaaaggcattaggctatgaaaaatattgaacctgaattactcgagaattttgatattgttgaagaggaaagtgaatgctattgaacttgataaaattgatgaaccagttgatttatcagtcattgcgccatgttcacatcatggaaaatgtccattacaattttttgatccacaagtatattcctatggtcaaataggtaaaaaattaaaattctgtagttatcaagtttcagttcatagaccaaagtacttattagagttaagagaggtaaaaagttagctactaaatggacatcaaagaatagtggtgttggtattgatggaattgctaaaggtggtagaggtagagcaggaggtaatgattatgaaatcggtagttattcctatttgattgttaacagatcaaaggaagatgctaacgtacttgaagcccatcgccaaaaggttcttgaagaaggaataactgaaagacctattggttatcttccacaaaatagaggtgaatattcacgtattcttgcaccaccaatgaaaaagaaaggttttgttataatggatgtttgtgcaccatctggacatcttgaaaaattacatgtctctaaatcagttggaaagcaagaatatcatgatgctagaaaatcaaatatgggagatctctggccattgaatttcaaatcttctagacaatcaactaaggaaaataccttctattttgaaaaaattgaagagaagagagaaaatctcagaaagcaaaagaaaagagatgcaactaagctcaaacgtaagattactaaagaatataaagaagctttggaggcagatattactgaagatgaccttgaagataatctaattcgtatggctaagattgacacatatgaatttttggctaaaccaaaggaagcacaaagaatcactgaaaagcagaagtttaagtactaatcatgctatccacacttttcaagtgatcaaataacaattgtataatataccatataatggaaagaccttgtaaatagtttatagataagtaattcactgtatttattttatccttttgcttttgctttacgctgagccacctcattgtgccctttctaataaaattgcctttaaagtatgtatcgaatatttgcccttacctacaacagtttgcttcttttgtataagtgacgagttacatactccagtagccagtaaatgtcacagaattacactgttttatcatgtatgtttaggtagccaggatgcttataagaaatacaattcaataatttgatttaaatagaccgtttactaactttaaaccatgtttcatatagtcggtgatacacccacatgttcgtttttatcttggcggttatcaattggcaaatgtaaggtaattcttgtaaactctaaagctgtaaaagatcgtaatgaaagtaatgtttattggtcttctcaaaaatacacggagactgaatataaaccacattccatttatgataatgttaaagatttaacgtcaattaaagatcagatagactttgtatttatgagcggaaatacacttgaagaattattagagtattctacaatgataaaggatatagttgatgaaaacacaataatttttgtagattcaacaaattgttcaaaacttgaagactttgttaatgaaaagttcccaaacaatgttttactaagcattacttcagaagtttttgttaagatactccgatacgacactagaaatgtttattcacatttaggttcaaaagttacaacaacaataggctcaacaatgtctaatccttctccaattgtaattgatacacttaaagggtcaaatcttcaagggaaaaaattgaatgatttaacaaatattttacagacaaatggggtatttccttgtagtataattcaaaatggtgttagaccatcaattaatagtttactttggaagcaaacactcacattcataccatttgaactactttccctattatatggagagttagatttgaataattctgtgcaaaactctttaataagaaaatcatttgatgacattttaaaattagcaaatttagattgtaaagaggaattcactgacattgctaatagatccaaatgcgaacaattattcgaccaactactgaaacagtttaatcaatcatattcatcatataaaatcaaatctttgaagtaataactttttctccgatgaatcaatatcagatatccctcttcatatttataactttgaaaacaattttgaggattttattccaatatgtctagatcaattacttaaaagtgcacttcagataaatgttgatatcccttatatcgaatgtatctatagtttttatttagaaattgaaaaaatcagaaaacagaaaattttcaactggattaaaaagacatcatatgaaccaataaaaccattaataacaccaaggcaacaacgatatgataacaacattaataacggtattaatttgagccatactaataacagtagtagtagtgaattagcaatgaatgggtcaaatacaccaattaccccaatgagcaatactgtaccacctgggtatacattttatcctcaacagggtattctgttgccagaaggtatgtcacccaaaatgttccaatatccaatgcttggaaacatggaatatagtaatcaagatatgagcagtaaccccaatatattcaagaaagattataaacagcatccaagattcaaagatattccaaatgaagaggtcaatggtaagaaaatatcctatcatcaaataaagaagcttatttatcagaaaaccaagcattcaaccgaagctgaaagtttgacgcaagctcaaaagcatatttatcaatatgcaaatttaaatcatacatttgagagtgttaataatagatacggatgggcagattcattagatgttttcaaactttccagtggattcaaggatgaagatgatgaagatgctgaagatggagaagaagatggagctggtcatgatgaaaacaataatagaaacgatgttgaagaaaataatatgacagtagaaaagtcattggataataatgagtctaatacagatgatgctggtatcacagaggtgtcaaaaactgatcaggatggtgggaatagtagtggtagtagtagtgaatctgatcaaataatggaagatgctaatgaggctatggagtgaagggaagttgagtggaatgttgtttctttccacatatatgaattttatcctagattgtttatatttctttttgtaatgtctaagtacttatataaagtatcaagatattgaattttgattgttaaattggataaagaaaagtggaaaaggcatggaaggaaataacggtaaaatagactcggaatttaatagagaaatggagaataccgaaatgtttcaaaaataaatttcaaaaccattggcatgcatgattgcatttcctggatgttgtaattagtacgtgtatacaaagagacaattccattaacatgaacatgacgcccacagatcaggagattaaaataacggcattgaaagtaatgctacgtgaaagagagagaatagtgcaggaccaacaggcacgatctgaggaacttataaaaatgaaagaaaagattgataactggaaacttgaatcatcacaggaacctgaactgtctcaatttcgagaagaagagatatacaaaaccgaaaagactgtatttgaagatactgaagaggttattaaagttgcaggtattcaaattcaagaagtattgaaagatgtagagagttcattggagggggctgcggatgaagaagttatcaaacttatagaagaagctaaagcattagatgtcaaagaaacatagtacaaactatctataatgtgtgtaagttcaatttgaaaagttaataaattatgtatttaatgattacaaaaaagaatgtaagtatatacattaatgaagacttactattgattaaaacttcttttattcttagtttcccattcttttaatgcttcctcccattcagtatcttcatctaatggttggttcttttctttatagtattcaactaattctttatgtttttcctcttctagtgcatcccattgatctttttgatcaatccatctttcttgaatatcaatatcttccataaatcccattcccgattgtcgtattgcatcagtccagatagaatcaccaccaagttcattactaccaaagcaatatccgttagttttatctataagtgagagtaaattaatcattgaagttttatcttcaattgccaaaacattaaatgaaagtaaaccaaaatcttcaattaaatctgcaattgattccgtaagtttagcatacttttcattaaaccaacttgtagatctttgattattttcttgtttgacatatggagttaagtaatgtaagtcttcaacatctgtgtaatattgtaacctgaaaggcaatccaccttcataatcatcatcttcattgtctttttgatctttattagcgtccttatcaccatcttcatcatctgaatctctattgagcattgcatctctctttctttgttcgattctgttcattttatcactctgtatgtatccattaagaagatctatctttgaaatcacattaatttgaggtaaatccaattgtaacattgatctaagtgctaacaaaagtgaagaaatccaatgtgatggaatagttaaattcatagagtcaactaatgaaacaacacaaagtctaaaatctaaaacctttactaatttcatgaatatgtctctaaatactggactgacggtataaagttcagtttgacctggacaatcaaatattatataagttgaattaccgtctctacttaactgaattaactcacgtattttatcaataaaatagtcaatactctctttaaaaatctccaagcaatgaattaaaccaccatttggccctaatctcaaattttcatcgtccataatctcttctaatgtgatgacatctctgatatctaatgtacaatcatatggtaatctatcattagctggatctaaattgacaattaatgaatttcgtccaatagaatttaaaaattgattcataccattacaataggttgacttacctgcccctggtggcccaataacaacttgtccatatggtgccatgctggtgtttccttgttgatatgttatttaaagatgaaaaaaatataattagtaagtagtgaaaaaaaaatttaagcatgcctttgatttattgccatgcaacgttaaaatcattcttttgatataagaaccaagagaaatatggatcaggaactagctgctattgatggaatattgcataatcttgcagggatacagtacttctatgagcaagaatatcaacatttagaaactttccataagttgatgattggtgttcaatcagagaccataaagagagaactggcaaatgaatcaacaattttccaaaccgaaacatctaaagaattagatgaaatagtcaaaaaattgaatgctttaaagagtaaaataacgtgtattaaaacagatattcaatcaagaactgaatcaaagcaaaaattaataactttatttaattctttgaaaaatattgaatcaataactggtggaacttcaacaaaaatagaaccaagtactaaagttaaagaagaaaaattagatgaacttccaataatggatattagagaagaattagatgatgatgatcaaattattaaaagtgaattgaaaccatattcatcagcagagtcagaattgaaaaaattaattgaagaaaagtccaagcaagcaccaaagcaaatagagaaaaaagaagtaaaaaataataaaactactaaagatgatgatgatgataatgataataatgatgatggaaattatgttgtttcggaaagctcttttagattcttgaacaagaaagagcctacaaaatccatagaaacaaaaaaaggaacaaaggaagaaagtaacaaagaaattaagaatgaagttaataatggagttaagaataaagtaaagaaagaaataaagaaaaaagtaaagaatgcaaataagaatgaaatcaagaatgaagctaagaatgaagctaagaatgaaccccaatcagttgaacaaaaggatgaattccgaccattcatgattcgtgaagagattgatgaagatggtaacactattaaaagttctgtttcaagaatccctcaaatggaaaaccagaatactaataataagattgaagagttaaaagaaggtgctgaagacgaagaaatagacgatgatcaattagaagaattatttgaagatatgggattccaaattccaaatgatttacaagaaggttccagtaaagatgctgataaagatatagccgaagttgaagaaattaatgttgaaattccagaaacattatctgttgaaaagaatgacctttttacattagaattgattgctgatgagcttaataacatcacagaagaaaattatgactttaaagatgattacggagatatggatgattatgagttacctgatattcaaaacggcgagtattctcatgacgatgatgaagaggaggaggaagaagaatatgatgacgaggatgacgaagatgacgaagtagatgatgaagatgttcaaaaacgtactctttctaacatgtttggaaccaaaggacaaaatctgtttgcacaaaaaataagtgaacttagaaacaaaaaagttggaaataatgttcctgatataaaaaagactgaaactattgaacaagctaccattatttcatcatcttcatccaaaacaaagaaatcagttagtttcaataatacggttgatatcaaacaagtacctgatatttgggatgatttacgtaaatctaacattgaaaatgagaaaaaatcacaagctaatacatctggatctattttcaagcgtcaaataaataaacctgttgaaaatgaaattacagaagattcagacgatgatgatgtttcaactaatgttatgaacgatatagttgagagacaaataacagatacaacaacatccactataccaccaaatattaatgcatttaaaacatttgatccaatatcattaagaaaacaacttgatgaaggtatgagtgaagttgataaaggttcatttattaaacttggtggcaagaaaactccatccaaatttaaattagctagagctgcagaaatgggtaaaaaattccaagagacacatattccaaaggaaactcgtgaacaattacaatcaattgtcagtagaaaaaaagaactgaaaactaatttaaaatctttaattccacccggtacaaaaagtgtaggaaataaaattgaaacaccaaaggatactaacccattacctgttaatccatcattacttgatgaagattatgaaattgttagaaacgatataaccgaaaatttatttgatgatgatgatgaagataatcaagaaaaagaatttcaatcatctaatgtgattgttgaggatgagatacggggtgatgaagaagttgtctctaaagatactgctgaaaagggggataatgatttttttccaaaatatgaaaaagacgatgttaaaacagaatcaaataagatagttgaaacaactatggattataaaactttaggcaatgatatggataccatggcaaaagcgtatgttttaggtttatatgatgatgatttagcaacagttggtgaagttattgaagaattggatgattttgaaaaacataatgaaattgtcaaagaaattgaagattctaaattacatgaaagagtttcagaaattaataaactacaagaaagtaatggtaaaattgaagaaattttagaagataataatccgatggttgttagtgatattgttgaacatgatatggatgaaattttagctgctaatgcaatacctgatgatagattagatattgaattaaatgatgatacattaactacacaagttgcattagattatacaaaaatgagatcaaatatgatacataaatataaaggaggttttaaagaaacagaaaaggaaaaagaatttgtacgtcctgaaggtagtcaacgagtaagtagatttaaagctgcaagactgggtatttaatttaatttatagatataataatttctaaatagtttcaatttattacacgtaattgtgtattctcttgataaccatttaacatgaacggactaattccagctttttctaaatattggcttgatgctgatctaatttgttcctttgctttactttcaaccgtttttataccattgtattctttccttgtacttgatcttgtataaattgatgtatcttgtggtattatcttcttagaatcactataaaatttcataacattatcatcattagatatgtcagaatatttagatgaggtaaaagaaaatgagtctttacaatcatagtatggcgtggattctttctcaacaaattgatgttttggtacctctggtggaatggatggatctatcacttcagcactcaatgtattcgtataatctcttaaatcaaattgattgatgtttttaattggtattgaaggtaattccttattatagttagttgttaataaatgattattattttcattatctgtattaactaaatcaattgaatctgatgaacctgtataacatgaagttggagcatttgaaaaaatatcatcgcttgtagaaaaaccacctgaaatggttgaattataagatgagtgagtattacgttgaggtggtgttaatggtgcaatatttgatgatggattttcaaggttaaattttgaatattcatcaagtaattttgaaacaagtgaagtttgagaatcatctgggaagttgataaaaagctggttgtttttagtataaacaatatcatcttgatcatctaatgattctaatgaaattggtcgtttttcactatattcagaaacttgatgattcatatcaataaaggtttcttgtttagatagtttcggatatgcattgaaatctgaagtttcattgatttgataaacataattcatagacacaccacgttttgtgttcttacttccatttgaatttgagtttttattagaatcgacatcatttaaacattcggaaattccaattgtacttatacgtttacctaatttcccccaaattgattcacggtttttacgtttattaatagttggtggttgaacaggaattggctgacattcactatttcttttcaatttcctatattcttgtgataatactctacctttttcattaattttactatctgttgaaattcttttaattggtggtggtatacaaatacttaaatttgaacgatttgcaagtgatcctttgaaatcttcaataggatcaattttatcaccttgatatttcttaccgtacatgttctataaaagagattcatagatagtagtggggaaataaatgggtgataatgtcttgtatttattgtgaaagtttatcagagatggctgacttgaaaaatttcctatttaggaaatattcattcaagattgtttcatgattgattttagtaaaagttaaattattggcacaatgattatataaagtttaaaagttttgaagtcgttttagatgctccaacgtttgtgagagatttaaaaggttctttattgaagaaaaaaaggtgtatacagtcaatttgatttttttaaataattttcgttatcatgaatcaaaagaaatttttcatgcaccaaaaaaaatttatttcatcatttaagatttatgtcacttttcaaagcaatcaatggagagtaaaccatcattagacactcgtttaggacgtgatgatccattttcatttggacaacgtaccttaactaatgaagaagaagttttcacccaaaatgcttgggataatgttgaatgggatgaggaacagtttaatcaatttttgaaaaatattgaaaatcagaaaaataatccagttaatgaatttaatcaaattgaatttaattctaagccaaagaaatattgggatttattctataaaaataatcaagttaatttttttaaagatcgtaaatggttagaaattgaattccctgaaatttttaaatgtttaaaagaagatgcaggtgaaaagacaattttagaaattggttgtggagttggtaatacaatgtatccaatacttgaaaagaataaaaatccaaaattaagagtttttggatgtgattatagtgatgttgcagttgaattagtacgtagtaatgaaaattttgaattattaaataaaagtggtaatgcatttagtagtgtttgggatttagctaatgaagaaggtgaaatacctgcagatatggaagagaatagtgttgatattgcagttatgatatttgttttcagtgcattaaatcctaaacaatgggaaactgcaatgaagaatttaaggaaagttttaaaacctaatggaattatattatttagagattatggtagatatgatcttgcacaaattagatttaaaaagaatagatatttagaggataatttttatgttagaggtgatggtacaagagtttatttctttacagaggaagaactgagagatatcttcgttaataaaggtggatttaaggaagaaaaaattggtactgataaaagattattgattaatcgtaagaaacaattaaagatgtatagatgttggttacaagcagtatttaaggtttgataactaaatgtataaaagtatcaaaatgttttaatagtagataaacttcccaaattggtgaatcaattggtaattgaataccatgacaataaatattaaaattttctggtattgataatttatcaaatataatagataatttagaattattaaaatttaaaccacttaaatttaattgcttcatttcatataatttaagttcattgacgatatatactttacatggtatatttaataatgaatttgtcaattttttaaagtaagtttcaaaagttttataatcataattaataactgaattccaaaattcagttgattgttttatactcattgacattacaatatttgatgagttatttaatatatagcaagattcttttaacttattatgccaaaatttttctagtaaagaatttaattcactaaaggaggatgagcttgaaatcaatgaagtagatggtaatttagatatttcaattgttaaatctaaatgattaccgtatgcatatatgttatgaagtatatctgttggtattgaccaatctatttctttgccatcaattgataaagttaaataaggaatttttgattccggtatttggaaataattgaaaacttcaggtaaaactgataaaatgtaagaatttctatgtatcaatatgaagacagaattatctggttgtttattttgtttataagtgaatgaacatacaatcttagagttccatactttatctagtattgacattgtgtataaagaagatcgtattgaaagtacagtaaaaatcatggggtttattttttatcaaaatttccgttatctaaaaattatttttaattatttacagattttttatatgatatattttggaattttataataatatgtagaaataaataaataattagataattatataaatgaagatactttagttaatttgaatttaatgaagatcataatcattaaatttataagttcttaataattgcatcagtgaaggatgaagttgaagcagtacctcttaaatcaccagttctattttctggacctgaagcaattgtctttaagacagcattttcaattttatcagcatgagcagttaaacccatatgtcttaacatcatacatgatgataataataaagcagttggatttgctaaacctttacctgcaatatctggagctgaaccatgaacagcttcgaaaattgagactttttcacccatattacctgaaggagttaaacctaaaccaccaattaaacctgatgataaatctgataagatatcaccatataagtttggcataaccataacagatttactatataaagttggatctgaagctaatttaagagaagtattatcaattaattcgaatgaaactttaatttctgggtaatcctttgcaatttcctttgcacaactaacgaataaaccatcagataatttcataattgaagctttatgaactactataacttcatgtctaccagtttctcttgcatgttcaaaagcatatctaataactctttctgaagcttttttagtaattaatttaattgattgaacaacacctggtacaattatatgttcaatacctgaatattcaccttcagtattttctctaataagaactgtatcaacattttcataaggagtttgataaccaacaattgatttacaaggtctaacattagcgaaaagaccgaaagttcttcttaaagttaaattcattgattgatgacctttaccaattggagttgctaaaggacctttaagagcaattttatgtttattaattgaatcaactgcaggttttggaattgttgtaacaccattaattaatgaaggagtaacatcaacaggttcccaatcaattggaacattagcagcttcataaattttaacaacagcatcagaaatttcttcacctataccatcacctttaataagggtaacatcatatctaccatttgattttggagtaccttgatattgacctgcaattttagcagaatattgtctttgagcattcgcagatgacattaataaagtagaattagtcttcttaattaaatttgaatttaaagatctaaacattttaaaagattttaaagggaaaggagtattatctacttgtttaatcaaaaagatttataattaaattttaaaagatgtaaaacagattaatgtcaaaaatagacatagtaatattaaatgggaatcaagaaaaaaaatcaaataaactgaggaaaaaactactaattttactagtaaagtaataatttaatctacgggttatattataattattattatggtaatattttctcaggggaaggggcactgtgcgtgtataatataatagtatctactactattgagttactatttctatgtattctctactatctactatctattatactgtataccattctatctaactatgtatctatctaatacttgatacttatactacttacaaacagagccctaattaacaaatagtaaaataaaataccccggagacgaacccgggaaattagaaatctcacatagtaaaaaactgattttttccactaatgcgttccccgccctcgcatttctacattttatacattcggttccgagttttaatttattttgtatagtgaagtatagaataaaatggtcgttgcgtcgattggtgtggtcacgtgctacttgcgtgactttttgtaaaattattttaatttaatttattttttaaatggtttcatgtttctgacatgaatttgatataaattaaattttgagttcaaatcattgatttcgcccaattgggtaattttacatttttcagaatttcatctattaactatctctaatctataacatttcctaatataaatacactaaaatctatatcatagatttattttattacacatcacttcattatctccatttatttataattttccttctcatataagcaataacaaataatatatcaaatataatgacattagatccagtatttttacctcgtgtcgttttaactgctgctattttaggttcaattattggtggttcaattattgcaacttttttcttatacccaaatttccaattaccaatttattttattgcaataccttggtttcatttagctgaatttttatcaactgctaattatcaacctcaaagaattgatataaattccttcattttagactaattatgcttattttggtgctcatttattctccctattaggaatattatttagaattacaattttccccaaatttgaaaaattataatattatttcctatattggtattttacttatcattatttcacaatttttacgtactttagctaatgcgtacagctggtaaaaatttctctcatcatataaaatcaaatcttgaagaaaatcataaattaattacaaatggtatttatcattatttacgtcatccaagttatacaggtttctattattgggcaattggtactcaattattattacaaaatccattatctgtggtacttttcttttaccttttggcagatttctttaaaaatcgtatacctttcgaagaatttcatttaattcgtttctttggtgatgattataaaaattatcgtaaaaatacttacatcttaattccttttataaattctcctccaaatgcttgatcctatatatagtcttataaatataactctctattcctctgttaaatcaataacttctttatcaactttactaacaatattcttactgtctctccttggtttaaatccaatcctattaatcttatttttaaattgaacacctcctgcactttgtttaaacattgttaataaatcgtttttacctttcttatcattcaacaacaatcttacgttttttattcattatttcattctctaaatcacctccatttccatttcctctattctctttattatcttcaattttcctcttcttctccttaccttcttctccatcatttataggtaatggtaaaggtaagtggtaatgggataggtagatttagtttgtaaattcccacgaatttcattcttcattaatgaattgaactgatgatggtaaagaaatacctaataatccattctttttatttttttccatcattaatctttccttcttcctctctaattgatcatgttttgccttttcaatcaatttttggactctatcacttgtactaattctaagtttatcattattattcatccgtattaaatcattactggtagtactaacacttggactaccttctttttcatttataacatctttagtaggttcaacttccggtgtctttctaactgttttattaatatctaagattgatgtcttattattatttaaggattcagttgtagattttgaaattgttggagttataggaatatttggttttccattatcagaattattttggacgacagattgtttaacaagagtattatcaacaggttgggttggtgttttggttctttcattactaacattggatgtaagttgaatatttgctggtttgacgattggaagtggagcaattggtgttttagtagtagtcttagcaggcatcattagcatcagatggtttaatagcaacgttagattcatttgttgatgcattggttgatttcgtttcgtttggattagtaacattctcattaacagctaggttcactaataacaggagtggtatcaacagtactaacactgttaatgattgggttagcaattgttgatggttttttattatcaatatttgctattactctgtgttccttctaaaatagaattttcaactggtttttcatttgtacttttattattgttaggttgagtttccactgtattagcattttgaactactggattcaaaataactggtttttctctagctggtatagctgtattcttcaattcagttggttatagtagcagaatcattatcagatttagtggctgaggcattgataacttgattagttttctcagtaacggtggctttaggagcactaaaaacatcgactattgcaccagtttttgaaattggttcaggagattctctagcaataatagcatcaaacacagatttaacatgattggttagattaggggctgaaacgggagatactgaattttgaggggttgatctcttggaatttgaattattttggacttcaaaatgttgaacattaggtttaaaataaactttagtattgttattttgcatggaatttgaaatttcatttggattgtttgcattagcattgtaataaatgttttgaactctactttgaggatttgaattcataatcatagattgttgttgttcaaacctctgttgttcaattcgttgttgttgagctctttgttgttcagcagcgttgttgttgttcaaacctctgttgttcaattcgttgttgttgagctctttgttgttcagcacgttgttgttgttcaattctttgttgttcagcacgctgtttttcaatacgttgttgttcaatacgttgttgttcaatatgttgttgttcaatacgttgttgtttaatgcgttgttgttcaatacgttgttgttcaatacgttgttgctcgatacgttgttgctcaatacgttgttgctcaatacgttgttgctcaatacgttgttgctcagctctttgttgctcagctctttgttgctcagctctttgttgctcagctctttgttgctcagctctttgttgctcagctctttgttgctcagctctttgttgttcagctctttgttgttcaatacgttggtgttcaatacgttgttgctcggctctttgttgttcaatacgttgttgctcagctttttgttgttcaataagttgttgctcggctctttgttgttcaatacgttgttgctcagctttttgttgttcaatacgttggtgttcaatcctttcttgagcaactcttttttgctccaatattttttccaaactattttgttcaactttttgttgttccattctcatttgatcacgtaacagttgttgagctgattcccttttctcttgtccaattctttgatcttcaatcttcttttgttctaacttatatattttatcttgtgcttgatattgttcatagatcttatttataggattagctgagaatgaacccgaattagcattagatggggaaggaatggaattgtgatgtatttgatgaatttgatgcattggaactataagtattggtagcagtgttaattgttgggaataaactagatggtgatggatcaacattctgtgtttggggtgtattcatattttgaacatgtgcgttattatattattcatgttattcatattattcagatttaaaacatttgcattactaacattttgtacatttgagtgattcttattagtagcattattcatactattatttctactaacattggttggtataacattttcaatatttccttgtaaaactgttgaaaatttacgatcatcaaattctaaaagtttctcctctaaaaatctaatttttttaatttcttgactatcagtttcagaaataatattgaatgtaagtccataacctgataaacttttggttaatctaatcaacgataatttgaagaacattgatgatgaaggattttggaaatcatcaattaaatgatgtctaacttctaataatgcattactaagtttgatgcgtttatctaaatatgttgaatttgttggtaaatttcttaatcgatcctaattcctttgaaaattctgaataaactttaaatgatgcatcatgaaaatataactttagacaataatcattgtaaatatcagtttgaggttttaatttctttaattctgctctcatgaatctatcaattgtaatacaaaaccttttttcacgtgaaataacattctttaatattaaacagcaattagagaatgcatatgccataaattcataaatagatttagatgaatcattatattgattaagcattatatcaggaaacccgagattattaacttttaaatccaaagctttttgaaatagtgtatttcttgtattcatatctgaatgaacataactttgatacattttatttaaagaattaaaggtttttgttatatgctccatttctttggaaacagattcaaatttttcattactgttcgtaggttttgacttttcttgttcaacactggaagttttttcagatattgatgattttgcttttgatatctttaattgaatttgtgcatattcattagctgattgttgaattaactgttttaatctttcataatctttcatttttgattccaagtgattggtcactttgtttaatgtttttactctttcatgtatttgtttgtctataaagtacttatcattttgatgggatgaaggtgctgtcagaggaacagcttctgcagttaccgttgatgatggtgctacactttgagtggttaaagcatgttgtacagatgatgccagagattcgttgaatattttgaaaacttggcgcactatttgaactaaaaggattttgtggggatagattaacaacagatgctggcggagctgatgatactggtataacagttggcaaagttgatgcttgaactgttacaggtgatttgggtaatgtttggacattacttgaaggatttgaaacgataggttgttgagctgttgattgtgtagctttatttgaattttttaaaacattattcaatgtttgttgatggtaatgtggtggttggtgtaggttgttgggcttgatgttgagattgtgagtgtggttttggataattggggtttcagtttcttgtatttgctacatttgttgttgcagttgatgaggtcattggttcatcatcatcagatataatttcgataacatcattcggtactggtattgatggtttaggtttcttagcaatatgatgagtttcagttgatggagcagtatttaaaactagtttttgacttgatattgttgatttattatctgatataacatgatgaacttcattatcttttgtaaaatgattcggcacttcaacatcaattggttttcctgatttatcataatctacaagaattaatttcccaatatcattaacaataacatcttcctcttgttttactttaatatttgaatttggtttagttgaactcataattaagttatttgaatttattttagatggattaattgttgcatttaattctctttgaggtatataagaaccatcattttgaatttcgacataatcgtattgttcgcttgtatttttaataattgaatcaaaataatcatcaattgctaaatgtttaattttaattttatttgtacaaattggacatgtaccaactggtgctttctcctgtaataataaataatattttaaatcaaagcattgaatatgattacatttaactgaacgtacaggatatttcattctaacaaatgaacatggacataataatgataaaatttcctttgaagtggatatatcatcattttcattttgctttttaatcatttgaatagtttcatctgctgttatatgaggtaaattcactacttgatcaacaagtaaatcaactttatttgttctaataatgaaaaaataaaatttatatttatattccgcataactatattttatcattagttcatttgtaccttttttctgaacatagggagttaaattaaccggtataacagaagattttttaccctttatacctttataattagcatcaacttcaacattattaactaaaatcctacaaggagttggaaattcaatatgtttagcatctttgaacctatctaaaggacttgcaagtgcagctaaaatataatttggagttttcaataattttctctccttttcagttaatgaaaatctaaaccgttcaacgtgtgttactatttttttttcatcaacaacaggtactaatctatcaatagtgaaagggttattaccatttgcttctattttctcaattatatcatagtaaactgatcttttaaatacaatttctctatcgggtatttcctcatcatttaatggataagttatagttgtattatttttaattgaatttgaaacttgacttgcaagtaattgaaattctggtaattctaaatcttgctctaataactcaattaatttccttgttgtaaaaaaatttactttattatttttattctttgcatcaattaagaatagttcaattgaatgtgtcaaatctgatttcctcttacttgcagctgttaaacttaaatttcttaaaagtttagaaacttcataacttttcaaattacccaatcttgtcatgacatcctatataataatttcagttagtattttgttatggaaaaaaaaatgaaatttttaaaaaaagaaaggtataatcgtgtacatacttgaaaaaatggagctatatcataaccggagctcacaggatccaaggctgtattgtttctagccagggacatgtctaaataagggtgatatgagtatataaagtagattaaaagatgtacaaaaacacgtaataatttaattataaatccaagatccccataaacaacccttatccaacattgaaagggaaaatcatgttgaaatgagcgtcactgcgaagggcgaagaaagagagaaaaaaaggggacgaaattgctatgacagtgttaatgttgtgagaaaaaaaatttttccagtgagtgagtaacctattacactgattcaacgtttattgaatggacaattggtatttaaaggtaagtgtttcctcttgaaagttatttgtttgtgggaattagtatttcttttacactgattatttatcttttatgccaatgtcctctcatgcatctcattctgtttccaattctgcctcagttaatgtttcaagtgtaacagatgctgcttcaattttagctgctaataaacttgaagttttaattgaaagatttatttcacaattaaagagaagacaagttacaggttcctataatgtcgcaattgcaacttgtaaatttcttatgagagttacatcaatttcaagatggaatactgctcaagaatttatcactttattaagattaattggtaaaaaaataactgatgctcaaccaagagaattctcaattggtaatattgttagaagagttttagcattagtacgagatgaagttaatgttaaaataccatctactgttgctacttctaatgaatcaaatactattgcacctgttaatacttcaatgtttcaacttttagttacaactggtaaagaaaaggaaaacaataataataataataataatacttctactactacttctacctccacacatagtagtaaatctgatttaagatccattataattcaaggtatacgagatttaatggatgaagttcaatcagttcatgaaaatattgaattaatgacagtggatttaattcacgataatgaaattttattaactccaacacctggttcatcaacagttttaaatttccttcttaaggcaagtttgaagagaaaatttacagttttaattactgaaaattatccaaatgatattgaagtttgtcatggatttgctaaaaaattagcaaactgcaaatattgaaagtgtaattatacccgattcaacagttttcgctgtcatgtcaagagttggtaaagttttaattggtgcaagatctgtttttgctaatggtggttgtgttacagctgcaggtgttgcgacagtttgtgaatgtgcaaaggaacatagaacaccagttttcgcagttgcaggtttatataaattttcacctggttatccatttgatagaaattcacttatagaatttggtaattcaggtaaggttttaccttatgatgattgtgatttagttggtaaatgtgaagttacaaatccattatatgattatgtcgttcctgaacatattgatatttatattacaaatattggaggtttttcaccaaattttatttatcgtattgttctcgataattataatactgaagatgttgatttatcataagaagaggtgacgatgatgatgttgatgatgttgataattataaaaaattatactgtatattacaattaaaaatatttcaatcaatgaaagtttttgcaaataaacaatgttatatgagaatacttaataacattgtcactgactgccctctgcctcgctcggctatgtctattataatgcatagtcttgagctggatactttctaatatttttaatattaataagtaatgggctatatcaacttttagcatgttcaactttgagtgcgctttcaccacggctagcccaatggtgaaactgtaattatcgaacttgatattttgtaagatttaaattgtaatttgtaagatgtaatagtaactaggccatattgttgggtaaatcatggtcttctgtcttccttttgaaaagctggttataaataaaaacggctgtgccttaactccaaattattatttatttttcacacgattttacttttctgtgataaatgattcgttccgactttatgtcttttctttaatcaaacactagtataaagatggagaattatatcattacagcagttgtattaatagttattctatttgcacttaagaatatattatttacgaatgttaataatgttgatttagaattagaaattgatcctgagacagattcatcaaaaacggatgatgtaacagttatacgagattttacaccaagggaattatcaaattataatggatttgatcttgaaaaaatttatattgcagttaggggtaatgtttatgatgtctctaagggtagacaattttatggaccaagtggaccatattcaaattttgcaggtcatgatgcatcacgtggattagcaatgaattcatttgaaatagaaaatttaagatcatgggatcaaccaattgatgaattagatgatttaacagaaattgaattgaaaagtcttgatggttgggaaggtatgtttaagggtaaatacccctgtgttggtaaattagttgcagatccacaattcagtaagtagattgtgtactgtagtgtagtagtgtagtagtgtgtcgtatatgtagattattacgtaatatcgggcttattttctatatcactgaaaaatattaagttttaatggaaggttgctaaatcgatgtttgtataattgactgaactacatctaaagaagaagaccttcatatacatacaatgagtacagttcctattacactcgatagtcttaccgttaataatttgggagtcttcaacaagattacatcaccaactgaatatccaagttcatatttagataaatgtagagagagtggagaattatgtcaatatgcatatttcagtgaagtgccagttggtgtaattgtattagatacaattattaataagactccaattgcattagaaatttcacttattgaagttcttaaatcatataaattagaatttaatgttgaaaaaaaattaattcaatatgcattagatcttgcaccaaagagacatttaagttcagtgtatagttcaaataagttcaaaagatacacaagttaatcaaaatattcagagagatgggatttagctgatgatgatattaagaaggatatctactgcaatgtatcatcaaaaggtgaagataccattttaatgaccaaatcgcttacgtaaggccatccagaagttccgattcgccactttgaaattttatgatggttagaacacagccgtgcatttttatatcataaattacacagtttatcattaccagaagaggaaaatctatgattgaaaatagttgtagttataattataaaagttgtatagttgtgtatactctgcttcttcatctaataaacagttcatatagttcagtatagtatagtatattatattataatataatatagtaatagattaatatactatgaaagaaataagtacatcaaattggatgtctcatataattgatgaaacttttatttcatcaatttcaattgctggtactcataattcagctgcttgctttaaattatctgctccatctgttcaatgtcaaggtaaatcaataactgatcaactaaacatggtgtaagatatttagatattaaattatcaaaagattatatgtcaagaggtgaaaatgttaatgatttaatgattgttcatggtaaattcccggtaaaattaagtggttcatataaatttaagaaagttttagatgaagtatatgatttcttaaaattaaattcaactgaaactgtactaatttcaataaaatttgaaaatacaatgcttaattggaatgctgaaactgatgaatttgctaaaattttatttcaaaaatttattgctcataatagaaatcgatggtatctttctgataatataccaactttaaaatatgcaagaggtaaagcctgttttattaagacgtttcccagtaattgaaaatggtacttataaaaaatttggtataccagctctttggggtgatgatattaaagttttcaataatgattcaatttgtattcaagattataattcaattaaaaattcctctgatttaaataaaaaagtagaattattcaaagatgtaattgataaagcaactgattatcattcaatgagtcgaataaattcaagttcaaactcaaaatctatttcaaaatctacttcaaaatcttcttcaatttcaaattctccttcaaatagtcggcgttctagtaattcaacaactaattcaacaactaattcaacaaataattcaacaaataatacaacccaaactgataattctaaaaatttcccattttctccatcaaattcaattgtttcatctccaaattcttcaagaaaatcatcaataactggagatactgatgataataatactgacactaataccgatttcaatgcaattaaattaaaagatccaaaattatttattaacttctgttcaggtgctaattatttacataaaagctattggccatcaaatgttgataaagctttacgtaaatttaatattgaaaatcatttcacaaagaattgtggtataattgtatttgactttgctgatagggataattggaatttagttaataaacttatcaaaacaaatttccaataaataaatgttgattaatcaaaagagtaaacatgacattgaataattcttataaactttatagtactttagttttaattaactttacttatatacctttcaaacaatcaaaaattataacaaagtatatttgacattttattaacatgtgcaagattaatgtccagagtcagtaccgaagtcaaaaaaaaacggttaagaaattaacttgaacagaaaaaataaatatgttgtaaagaaaagcaaaaaaaataatcgtcacagacaggattcgaacctgcgcaggcagagcccaccgccttagcagggcggctccttaaccactcggacactgggacaacttgtttgcttctactaaacatatttttcttgtcggtacttagttaattttcaaaatttttaaattgtgtttttttgttagatctgggcagttttcagcaactttaaaagactgattatagagaaaatacttgaaagtttattttgcgtgctttaaaagtctttaaatttaaaaaaattgttagtctttcactacctaaaattatcatgaaaaatcagtaaatggtaactttacagaatttttttgcaataaataaagttacttagccattgaattacagaactccaaaacacgaaaaacttttacttaaatagtaactactaaacatatctaaagtacgccatgtcatgatcattacttactacattttataatagcacataagaaaccatttaaagttcttttattttataaaaaaattatccataataaacattttaactcaaacgagctgtatatataaacccaaccagatatcataaaacttcaataatatcataaatttctgaaaaatcttcaataacataatataattccttacccgtatgtttaacgttatccaatatttccctatttttacgtgcatcttcaccatttaaataaacaacacaacctttacgatttagtcctgtataaactttattaaacagtttcaataatctataatattctaatgaaatagatcgttctcttgttaatattatgaatttttcattacaatgcagctttttcgataataataagccttttaatgattgtaaacttttcatatctgttgttttatcacctagtaaattcttagatttcaggaatacttatatcttttattggatttttatgcttattattcaattcattcattaaacacatataatctaatgacggtattaaatttaattcattatcctttataattgttatatcatttctttcattaagattctcaacatttttcaagtttactgaatatttcttcattaatattaacattgaatcccagtcctgtaattatacgtcttattaaatatgaattatttgtaaatttatttaatttttccttaacagttcctgaaacattagcaaatggtacataaacagtcttaattaaatttcgaagtattttctccttttgaagtttactcatattttgatttgtttgaaatgacactttatttaattcatctttccacgatttttcaataacttcatagggtatattggctagttcgggaatttccttaactataagattttgtactattttgaataaattcaaatcttcacataataatttgtcatgaacaaataaatgacatggtgttctttgaataactggttttgaatccatccagtttgttttaatccagtgtttgataatactatcgaattcacttttagatcctttagtaaggttagatgttgcaaaatcagttgttgtagcaagtttcttattcttcaattcatgatatctcttactcatacttttaggtattttttcaaagtctgatggattactagatttcttagattttacatccaaagatgggtgatgataaacacctgtaattgtatctttaggatattgtgcatttttcacaactgaactatgtcttgaacttgtcccattgagaaatttcttattatttgattttgaaagatgtaataacttttccttcatgctttgaaagctggaatctcctgagcctttcacaaaacgtactaccggcgttggttttaacatggttgatgagtttttgagatataaagattaagcaaagaaaaaaggttgtgtatggggaaagtgtgcaggatccgtaggtgaaacttgaagagaaactttaaaatttccagaatttgcgcattttcaagggaccgataaaacctgtgtgatacatgtgtttcggacagtgcattatgttaactatataattatacgttgtatttacagtaagattataggttagttataatatataagttgtatatatgataagaatttagttaagaatattaaagacattggatttattcaagttgattatcagctctcttggtttcctttaacttgagtaattgttcaataacggtatctaaagcaattgcttcattcttaccttgtaagtcttgaatatctctgtttctgatattaacagatttttcattagcttcttgttcaccaacaatgaagataaagttgtatttttgaacttgaccatttctgaccttcttttgtaaagtattaccagtaacatcaacatcagcatagaatcctgctgcatgtaatttttgttgaacttcttgtgcatattcattatatttaacaccgactgggacaactaaaacttgtcttggtgataaccagaatggccatttacctgcaaaatgttcagttaaaattgctgtcattctttcaacagaacctaaaattgctctatgaatcataacaggtctaacaactgatgaagtatcttctttgtccttaaattctaattcaaatctatttggtaattggaaatctaattgaatagttgcacattgatgccatcttcttaatgcatcagagatcataatatcaatttttggaccatagaaagcaccatcacctgcattaatttcccatgcaccaccccatttatttaatgcttcttctaatttagcttctgcaccattccaagtttctaaatcaccaacatatttttctggtctagttgataattccatcttaaattcaaaaccgaaaataccataaacatgttttaagaaatcgaaaataccagtaatttcatcaccaatttgatcttgagtacagaaaatatgtgcatcatcttgttggaatcttctaactctagttaaacctgataaagcaccagaatattcatttctatgaataacaccgaaatcagcaactctccatggtaattctctataagatctttctcttgatttgaacattaaacaatgacctggacaattcattggttttaaaccaaaagtttccttttcgacatcaaaggtgaacatattttccttgtagttagcccaatgacctgaagtttcccataatttagcattatacatatttggagtaataacttcttgataacctctaatttgatattgttctctcatcatatcaactaaagtattgtaaattctagtaccatgaggtaaccagaaacaagaacctggtgacatttcatggaagaaaaataaatcttgttctctaccaagttttctatgatcccttgaagctgcttcttctaagaatttaagataatctttcatttgttgtttatctgggaatgaaacaccataaactctttgtaaggaatcattctttgcatcacctaagaaatatgaagcagaattctttaaaactttgaaagtcttaattctaccagtatgaggaacatgaggacctctacacaaatcaattaatggaccacatctgtaaacagttgatgaggtaccatctggaattttacttttgattaattcttgtttatatttgttatagttgaacatttctaataattcttcctttgtcataactaatctttcaaacttttgtttatccttaattgctttttgacatgcagtttcaatatttttaaaatcagcttgagagacaacagttttaccatcatcaatagccatatcatagaagaaaccatcttcagttggaggaccaaaacataaatgagcaccaaaatgacattcacaaccttcacctaaaacgtgagcagatgaatgccagaaaacagctttaccttcaggatgttcaaaatccaagaattctaaagtacaatcaccttctaatggtctttctaaatcccataattcaccattaactttagaaataacttgtctatcagagaatgatttaccaatttctttagcaatatccattggtgaagtttcatatgatgtaccttccttaacagtaccatcttttaaagttgccttaattggttttctttccattacagcaaattcagcatctctctttagccttaatttgttcaaagattttaactctgtgatcgaaaaattcaggttctggagataaaaagacaggtcttgttgactcaccttcctttgctttcttttctttctttggagcagcctttttaggtgcctcaggcttgattgataaatctttaaccttttgttgaacttcttcagcagacattatgcgattaagattcaaagtgacttgttctagagaaaaatacgatacaacagtttattataattataatattgaaataaatttaggcattgaaaaatggaattcagtgacaacgtagaaaaaaaatgtctggagagagggttccgggtaagcttttttttcgttgcatgaatttttttttattctccagtacaaggacagagatctttttggtagagttacaccagtgcaatgagtttcagagtgatagaggacgatggtggagataccgttacaaatgtactatctagaacactagcagaggaagatatgattgctagattagagaaaaatatacagaaagagaaacagataactattgcaggtaacaccaatttatcagacaacgatgatgatattgataatgaaagtgatgataaacgcaaggctaaaagacagaaaatggccaaaaagaaggcaacttccgaaaaggaaacagatgtctcatatgctccaacaattgatgaagttacaactaataaagatcatttagctactttaagaggtgagggaagatattttggtgtaactgaacctgatgtcaatgaacctgtctgttcaaattgtcatagaagaggacatagacgtggacaatgtaaagttgttgtttgtcatgcatgtggtaaagttgatgatcattatgaaacacaatgtccaaattcaatggtttgttcaaattgtggagagaaaggtcattttaggaatacatgtccatctaaaaaacatcaaacttattgtgttgaatgtgattcaagaagtcatgtaaccgagagatgcccatcaatatggagaagttatgtattgaagcctcgtagtgagaaatctaagatggcattcccaactggtgctatattttgttataactgttcagcaaagggtcattacggtgactgactgtcctaaaatgagaatatcgaaaacacctaatattaatggttctgcattttcaggtgaaaatttaccaaaagaattagttggacagtataaaaattatcaaaattcctaacagatacgatgatgattcatttgatccaaataataggaaaagaacttatgataccgctaataatacaaattataaccatgcaccaccaccatatccaagattcaataattatagcaatggtaataacaataatagttataaaaacaacaattatagaaacaacaacaataataatagtggatatccgaaaggtccaactaaagtaggttatatacctgcaagacctagttcacaaaatcaaagaagaaataacttctctaatagttcaaataaaaacacaggtaattatagtaggaataataatggtaattatggtaataacaataataacaacaataacttcaataactataattccaggtcttcatatttcaataataataataatagaaactatggtcgaaataataactattcaagatactagctattatatccataataataacaactctcctttgtatatgtataactttactattgtatattctttataaactaacataattttaattgttactttctctgtgctgatgaatatatggtaactccgatttattaaattttttatttaactgttcatatttaacttcattcaaagttttcattctccccggtttaccaccctttagcgctacaaacattggatccattgccattgccaaaatagtgtctgcattcttaatatccttgttcatagctcagtattttctggtataaaaggaagaagtgattcagagatctattaagtggaaaatttgcgggaaattctcgaattcaatggtgtctcttctttatgacaaggtctcttttaatcaaatttttctaagtttaataatctacaattgtacaaagggtaactttaatttaatttaattaaataaactataaatctaaaatttttcattgccttcaaccacactagtttattttatgatgaatttcagcaaattcatttgttaattcaacataaagtttaaattcttcacgtaatgtattaacaatcatttctaaaccaccacgagaatcaatatttgatggtatattgttttgatctaaatcattaacacaattttcaacttcttgcagtattatttcatatttagaaattttaccactaaattcttcaattttatcaacataataagaatttaatacttcagttatatttattgatttactattatgttcttgctgtgtttgcttttgtgctggttgtgaagattctaatctgttaccactaacaccaatgattaccttagatgatccttgtaaatttccttgatcattgtttgaacttgtcattggattagttaattgaaggaatactttgattaatttctcaacccaattattaaaactttctaatgttttacttttgaaactttcaacaaaatttaaatctgctgttaatgcttgattagttgatgcatatactttttgtaaataatcaatatctcttggaacactgactattagttctttatgttgagattcttgatctttcaaatattcagcaattgaaacttgtgtttgaatatattcatctaattgttttagttcttcttgaaatgctggtggtaaatcagaaactttagtcattgcacttagttgaggcatttgttgttgttgttgttgttgttgttgtgtttggaattgattattgttttgttgaccaaataaaccaccagttgatgatgcaggtactaatgagtttgaattaccaaataatccaccagttgtaccagttgtagttgctggtttagcaccaaatgagaactgactagttgcattgttactaccaaataatccaccggtagctggagcggaggttgcaggttttgcaccaaataatccaccagttgctgaaccagcttgtgcagtattattaccaaataaacctccagtagtggtacctgcaggtttagcaccaaaaagaccacctgaagtggcagtggttccggtagtagcaccaaatgttcctgctggtttattaccaaacaaaccaccagcagctggagttgcagatgtgttattaccaaataacccacctgaaggttgtgtagtagctgtattattattattattattattgttaccaaataatccaccaccagtagtcgaagtggtattattgttattaccaaacattccaccagctgcaggagtagttgaggcattattaccaccaaaaagtccacctgtagattgtgtattattattgtttccaaacaaaccacctgcacttggagctgcagcaccagtattattattgttatttgtaccaaatccaaaaccacctgctgtattggtagtattggtgtttgtattattattattattattattattattattattaccaaatccaaaaccagttccagtacctgttgtaccagctggtttagcaccaaataagttcccacctgtattacctccaaaagaggtagcacctgcattgttgttattattattattattattagcattatttccaaacaatccaccagttgaagcaccagtattattgttattattcattccaaatcctccactcattggttttgaagcaccaaatccaccaaatccagttgatcctgcacctgcacctgcagtattattgttcatagtattattgttattgtttgcaccaaatgaaaatccagttgatgtagctggtttattttgaccaaacccaaatcctccaccagatgacgcaccaaacatactgagttgatactatccaatgtatattatataccaatgtcttaaacacctactgtcttctgtcaaaagatcaacataaaaagaatcatatacagagagaaaatgtgtaagaaaaataaaatttcatttggtgcactgagggtggcaaaatggtgtatgttgtcgaattcttccactgggaggcacattaaaatggagttggtgataagtgctcgtatttcttttgggtttctgtattgtgttatttaatccatagacaattaacttaaactaagagtattatatatcacaatgggtatgttacagaaataatcttattttttcccatttgatcaacatttagaatcgaatattaacatttttatattacaggtattccaaagtttttcagattgatttctgaaaggtggccattgattgctcaacaaattgaagttgcagaacaaatcgaatatgataacctttatttagatatgaattcaattttacataattgttcacattcaaatgatggagaaattagtcgtcttacagatgaacaaatctttggtgcaatatttgcctatattgatcatcttttcaatttaattaaacctaagaaagttttttatatggctattgatggtgttgcaccaagagctaaaatgaatcaacaaagagcaagacgttttagatctgcagttgaagctgaagaaatgttacaaaaagcaattgaatcaggtgacgcaattccaaaggaacctgcatttgatacaaatgcaattactccaggtactgaatttatggctaaagtcacagagaatttaaagttctacattaatcaaaaagtttcaaatgataaacaatggcaagatattgaaattgttttatcaggtcatgaagtaccaggtgaaggtgaacataaaattatggaatatattagagttcaaaaagctcaagataattataatccaaatactagacattgtgtttatggtttagatgccgatttaattatcttaggtttagttgctcatgagcctcatttttcaattttaagagaagaagttacatttggtcgtaatcggaaactttcaactgatgtatcaaatcaagtatttttcttattacatatcagtatagtaagaaattatttacaagaagaatttgcatctttaagtgatgagatttcattcgaatatgattttgaaaaagttttagatgattttgtccttattttatacgttattggtaatgatttcttacctaacttaccagatttacatcttaataaaggtgcattcccactattattacacacttttaaagaagcaatgagacgtactgatggttatcttaatgaaagaggtcaaataaatttgaaaagattagcagtttggcttgatattttaagtgtttttgaattagaaaattttgaagaaggtgcgatagatgttgaatggtttaataaacaattagataatgtttcaagaagaggtgaaagagctagagatagacaaggtaaagaattattattaaaacaacaaaagaaaattgttggacaattaggaaactggattttaaaagtttatcatgaaaattttgatattgagttattttataaagacgaatctaagatacccgaacttagcttaccttctgaatttttcgaaagtgaattaaatactgagtttatcaaaaagtttgcttatgaattaggattatttattgttcaccatggaagtactaatacatacacagctaaattagatattgatggtattaatcaaggtgaaaccaaagaagagtttgatgaaagatttattcaaattaagaaaatcattagaaactatcaatcaggcataattgttgaggatgaagcaactttacgttcagaggaagatttatacaacgttaaattcactgaatggaaagacaaatattataaagaaaaattacacttttcaataaaagataccgataaaattgttgaaatgaccgagaattatattgaaggtcttcaatgggttttaaattattattataaaggtatatgttcatggccatggtattatagatatcattatgcaccacgtatttctgatttatccaacggtttaaaagttaaattttcatttgagatgggtcaaccattcaaaccatttgaacaattaatgagtgttttacctgcaagatcaaaggaattaattccagtatgctatagacatttaatgacagatgaagattctccaataattgatttttaccctgatgattgtgatattgataaaaatggtaaaaatgcatcttgggaagctgttgttttattatcatttgttgatgaaaagagattgaaactcgctatggaaccactaaattcaaaattaaatattgaagaaagacaaagaaactcatttggtaatgatctgatatatacttataatcctcagatttctacattgattaaatcaccattaatcagtgttttcccagatttcacatctcatgctactgaatctgaatatattttaccatcaatggaaggtaaagattttatttttggtttatctaaaaatgttttaactggtaaacacatgctttctggttttccaactttactaacaattccttataccagtgaattaagaaaggacgaattaattgttttccaacaaccaacaagatcagaatcaatgattttaacattagaaaatgaatatatgaatgttacccctgaacaatttgctaaattgtattgtaataagattgtttacgcaaattggccatatttaagagaatatcaagttgtttttgttgttgactctttgatgagatacgaaattcttaaaaatgattctaaagtctctcataccccaatggaaagttttgaaattgctgaatataataagaatatcgaagacattaattatataatgcataacaagaagggtttaagatttgctgctaattcagaaaacattgtgacagatacaaaagatagcaaacctggaaaaattcctaaagaagaaatcgatggtttagtatatgttagaaaagttgttggtgtttctccaactagttctggtagattagttaaaacatattcagataaattagaatttttccctattcaattaattgtaccttctatcgagaatgcagatccaagattccaagagaaagaacctgttccaattgcagaagagtttcctagtggaacaccagttattttcttaggtaaagcagcatatggttcatcatgctgttgttattggcttctgaagacaacaaactagcaattcaatttaataagagtgatacacctgaacctctatttggtgtagatgctgcaaaaattgaacgtgaaagtatcaaatattattctgcttatgagacatctaagattttaggtatctcaacatttttcttatctagaattacatcaacctacatgatattagacaatcaaaagaaaatcaatgttggtctaagtttgaaatttgaaggtaaaggtataaagacattaggctataccagaaagaacggtagatcatgggattatagtgcaattgcgatctcacttattaaagattatttatcaaatttcggtttattccttcaagctttactaagatataagggtaataacatacctgaatcaaaagaacttttcaaaaatctgtctgttgatgaaagagaggaactaattagaaatgttaaagactatctattgaacaaaaaggagaattttgttcaagtttcattaaatagtgactctttatcaagaatttcagtttctaaaattgaatctcaaattgttgagtatacaagtacccctcatccaacaacacaattgaatgttaaaggtattccaagacttgcagttcttaatccaagtattccagttttgaagttaaagcaacaacaatttagattaggtgatagagtcgtttatattttagactctggtaaagttccacttttttcaaagggtaccgttattggttataagtcatctgacactgctgtttctgttagtgttttgtttgatttcccagttcttactggtaatacatttgatggtagattgaaaactcaacgtggtttatcaattgattcaacattattgttgaatattacactgaaacaatttttatacttacctaagggatctaccaacaaaacagttaaacaaccaaataataaggctagtgacattaaaaaacctacatctaaaaatggtaatgcaaaggcacaaactaaagttgaacaaaaatctcaaaaacctgtaaagagtaatgaattagaggaatcaaagaaggcaattctatcttcattatttgcaaataagaaagaagaaaagaaagacaaagaagaagtaaaggttgcagaagatacttccgttccaaagcaactgccagcagctgcatcatcagataagaagaatgttttaaattcactagttaataatgtgcttgcatcaactgaaaaagcaccatcagctccagttatcaataatcaaatgccaccaaatggtttctcatttgtcattccaccaatgaacggttttgttccacctccaccaggttatccaatgccaatgattccacctaatttaatgtatccatataatccaaatatgatgccgattccaggaccagcattcccaatgatgggtcaaccacctgttcaaggtgcaccacctaacgcggatgctgttgatggaaaaccaaacaaggaattatctaatgatattatggctgctttgaagggtgttgagatttctgataaaaaagaagataacaaaacacaagctgatgaaactaccaacggagttaataatggaagttcaagaagtagaggtaatggtagaggaagaggaagaggtagaggcaggggtaatggtagaggtagaggcaacggaagagttagaggaggtaagggtgaaaccaaccagatctctaatacggacactcaataaacctgtagtattaattaatgttttaatcttataaacttcttttttcttattataatatatatagtacacatgtatgaataatcaattgttttttaaagtgaaatgtaagttatttatgaacatttaaccatttctcttcaaatccattcccacgaataataccatcccaatgataacctggaggtatattgaatctgttaggcggatatcttgaaacatcagtaaataatttaccaccaccaggacttacaaagcgtgaatctattttctctttatgtttagagataactttcttatcaaataacaaagctggatcttcaaaatcaatattatcttttcttaaatcatcttccgttttctttattttgttcttctccttttgagacagtagcttttcacgcatttcaatttctcgttgtaaacttgatttattggtagaaccagatgtctttttttctaatttttggagttttgttgaatgacgggattccagatgttctgattgtgaaagtttacgtctttttggttgtttctctgttacaataggatcagaatctttcaattcttttgttggttccgatactgactttttatcatcttgccgtattatttcactctttgtctcaacatttatccatttaccttcaaattcagagctatcaatgggtttcttcacatcattattgttttcttttttactttctttatgggtatcagttttcccaactacgtcattttttttaattttctctatcacactggcattttctggatccacttttttctccttcttcttcatatactttttatccatatactcctgtaatgacaacgaccccattgtgcttgtagattatcaattggacatatatcttcctaaaaaagtaaaattaagataaatattttactgtaatttgatgtagaagtgaaaaagttgtaaaaaaacatgttaaaattccgcgcaaaatctatacatattatctcacatttttgagtttcgccttttcatttaattgtttggttgatgataatagtaaatatattcctagtagctgtttctattatcagtggatactactattgacaatgagttttgaagattggagaagaatagatgttgatcaatatgatccagagaatgtatatgttgaagatgaattaccagatacacgtccaaatacctcattgcaagatattcaatcattaacacaaacattacgtagttcaattcagcgtatggatatagttaatgcattgaaaactgcaattgaaaacgcaccatatggagcaagtgaagaagttaaagatgcttttttacattcagtttatgaagttttcgtaagtgttaaattaagtgatattaataattttattggacaatttgatatagattcaattgatgcaattgttaaatttgtatatgttttaatgagtaaagaatgggcattaaagcaatcaagcacattaattgtttggttagatagaattgttgaaacagttggtgatggtccaattgtacgatacttaagtgatccatataaattatagactattataaatttataataaaacttcctattagaaaaaaaacactttgatgatatacacactgtctatatatagtcttagatttgtatatattatactgtattgttattaattatattatatccattacttacctacctgcctacctaccctcctatgatctcttaatgatcaagcacaaattacgtaataatccattcttaacatcgcgatttccaggcttttgacatgttgagtttattagtagaaagagctcttcctaagtagaggcagaaacaggtattcattgattcgggatcaatttaactaataggtacacgaactatggctaagaaatcaaatggtggaaagaaagcaaaagctaagaataaccaacaaaagaaaaaagtagaatctgaaattgtaccagaggataatgatgctacttttgtagttggtgattccggagacgaagatgaaaatataagtcaaaaaaatgctgatttaaatggaaatgatatagaaaatgatgattctagtgaagatgagaatattaagagtcaagttgatgaatcatcaagcattaaagcgaaagaacaggaagatagcaatgttaatgaaactccagtttctcctgatgaacacgaaattaatattcttgaaagtgctcaaaatttatctcctggaacttcagaaattgctgttgaattgacagagaacaagaatgaaggagaagataatgaagataatgaggatactcatataacgacattgaaagatgacaaccaaggatcatcgacaaagaacgaaactttcgaggaaaatagtgaagatgatgaaactgaggaagttttaaaggtaagttcagattatgagagcaccaaagatgaaatagaagaagaagaaaacctgaaccaggatgaagagccagtagtggaagtaactgatccagtaattgaaaacgatactgaaactcatgttgaagaatacacaaaaaataacaatgaatcaattgaagatacaaaagatattctttcagaaaaattaactgaagataataatcaaaagaaaattttctctaatgaatcggctgaaaaggataatgaaattcttttagaacattcagtcaaggaagaaattgaggaaccagaaactaccagaaatgaagaaaacgaaattaaagaattgaaatctacagaagaaacagaactcgaagtcaatgaagaaccaagttcaatgtccagaacatcttccgaaaaggctgattctattatctcttttaaacacgatgaaaatacaattataaactataatgaaacggaagatcaaatcaatgaaaaaatatcattgaaggaacctactccattaactaatgaagaactaaaaattttacaaagtaaatttatttatggactggcagttgtaaattttgatcacattaaaggaccagaattaacatattggttagatgatgatataattaaagtaaatgaagatgatgaacaaaaagaaaataaagtgattgatgaaaaaattgataaatatagtaaaatatggccatatctggcatttcaagcattacccgatggagttcatatgtttgatgaaacatttacacaatttaccttgagttatgatgaaaaatatcaaagagagacaaatgatgaaggagagatgacaacattattcggatgtgcatgtataagacaaatcgattcaagtttaattaaacctgatgaagatgttaaaagaagtgttgttcaaaaatctattatattaataacgagatgtccacttccaattcaattacgtgaaaagctgagtataatttgtaaaagttggtttgaacaatatgattttgatgatgttagtatattaaaattattttatcaagatatttcaagaaattataatgaaaatggatttataattcaagatgatgaattatttggacaaactaatgttgaatcaagtaagaaaataatcaaggagggtgaaattttaatgggatttaattttcaagatattgttattaaattacgtagaaatttattagtattatttaaattacttattatgggtaataaaagaatactgatattttcaaaagacttaaacttattatcaaatacacaatatgtactgattggacttatagctaatttaattgttcaattagagaaaagtggatatccaaagagtaaagaaaatgaaagagttaagagccaatcattaaaaagctctgatagatcatcagttttgaaatttttaggattgccattaaatatttttggtaatggaagtttttttcaaccttatttaacattacaacaattaacatatttagataaggaaggagttgaaagtttccttgttggatcaagtaatgatattattttagaacgtaagaatgaatggttcgatgcagttttatatttagatgaaaaggataatagtttattaaatagtattggatttttaaatttaggttgtaaactggaaattgttaacaaatcattaaaagataaattaacattaagttgggatgataaaaaatttattgattatataatcgatagtgttgaaaagcataaacttgagaataaggatcatgttgaaataccggagaacaaaacaataaattctaatttatcaattgataatggtaattataaaggtggagatgattttattagaagtttatttgaagattatttaattggatttttaagctcaattaaatacgatgaatttttgaaaaatgaacatgaaagaggatttgatcaaattaatgaaaatttgaaacttgacttatttgaaaattgtattggtaaattcaatattaaatacgttgaaacttttaaagagagtaaagtattcaaagaatggaattctattactgaggatgaattatttaatttttttgaaccacgtcatatacatggagatgaaaaattgaagaaagaggaagtggaagatcctattacttcctaaacaactggaagaggataaaccagaagaagaagctaagaaggaaagtcctaaagaagatacagttgaaattgaattaccgaaagaaagagacaatgaagaaccaccagtgaaggaaaggaaagatgaaaaaattctcaatgatatcaaatggttcttcaagaagggtgaagatggaggtgcagagaagatacgtagtttgttctcatggaaatagtgtaatatctttataaatagtaagaagtagctgtacataaaaaatgaaaatgataatattacgataagataagataagataagaaagctataaaacatgcgccacaaaacgtggtacataatcaaaatttaaaataatagagtgcaccagcctcaatatcgaaaaagaggctaagtttcccgtccatgtccttgattaatggattataaagcaataaatctggtgacgaaggattcttttacaattgaaagtaagatatttcttttcttttatttatttactatataatcacggtttttgctaaatggtaagccccattccgccacaaccacttttcacagtattaaatgaagcaaggaatggtatttcattcacagagattacatttttaacatttcaagcagttattcaagttttcttaatttgtttatcaggattttgggcatcaaatgttggattattaaataatgaaggtattaagacaatttcaagattaaatgttgacttatttacacctgcgttaattttttcaaaattagcaagttcattaagtttaaaaaaattatttgaattaattttaattccaattttatatgcaattacaacattcgtttcatatatttcatcaattttaatttcaaaatggtttgatttaactgaacctgaatcaaattttgtaattgcaatgtcagtttttggtaattcaaattctttaccagtttcattaactttagctttagcttattcattacctgatttagaatgggatgatgtagttgatgatacacctgataaaattgcttcaagaggtttgatttatttattaattttccaacaattaggtcaaatgttacgttggtcttggggttataataaattattatcaaaacaacctaatcacgttattttttataatgattatacaattgatgatattaatgaatttgattcactaaatgatattgaggaatttgataataatacaactagtacaaataataatagtaatagtaccattaataaaattaatcgtacaggtttcaatgataatgataatacttatatttacgataatgatgatgatgcatcaccaaatagtagattattagataataacaatgataatattaatattaataacattgaacaatttgatcataatactaataatattactgaatcagaggaagataaagatattgaaatttcaatttttaaaaaaataatcaattgtattttaagttttatgaatccaccattatggtcaatattatttgcagttattgttgcatcaattccacaattaaaggcagaattttatgaaaatgatggatttattcaacatacaatttcaagtgcaattaaacaattaggattagtttcaattccattaattttagttgttttaggtgcaaatttagcaccaaatagtgatataccacctgcaagtccacattataaaaaaatgattttaggttcattattaggtagaatggttttcccatcaattattttattaccattaattgttttatgtgttaaatatattaaattaagtataatggatgatccaatatttttaattacatcatttttattaattacttcaccacctgcgattcaattaagtcaaatttgtcaattaaatgaactttatcaaaaggaaatggcaggagttttattttatggttatgcaattttaacattacccgttacaattattgttgttgttacatgcattgaagcaatgaaatggactcaagcttaattatataaagtgatctatctacctatataaataaagtaaataaattttataaaaagataaaaaaaattccaagataataacggtaaattgataattgataattgataattgataattgataatgataatatataatctagataaggtacattacgtgatgatgttatcaaattaattgttgcacatgatgtggctgggcaaaaatttattttttttacttgatgattgtcaaatttcgaggaaattaattagttttctgctttaaggagtatctttatcttgggaggcaaattgtattgttctttttactttcttatatcgtatctaagcaattgacaatataaaatatatataagcaataatgtctacatttttatttaaatggtatgtattcaattgattaagagaaagaggagaatacataatatataattgatttattttatctaatttcccgaacaatagaatataatagaatactaacatttaccaatgatatttatatttatatttatacaggcctgcagatgaaaaagttgaagaagttatagttacaggtacatttgatgattggtcaaaaagtttaccattaattaagagacctgatggtagttttgaacttgaggttccattaccaaagggagagaataagattgaatttaaatttgttattaatgattctgaatgggttacaagtgatcaatattggacaattgttgatgaaactggtaatctgaataatttaattgaaattaattcagatggtgaaattattaaaggtgaaaagggtaaagtttattcaaatggtaaaaatgaagttggtaaaacaattattccagaaagtggtttaagtatgggtagcaatgcagttgaaactgaaaataaagatcttggtacaactgttatgccaagtgaagaaggtgttcaaaaaacattaggtgaaccaggtatttatgttccagaaaatccacaagagatgaatgttttcaaagaaattagaaatgttgatgcaaaggaactgaatgcacaaattaagaaagaagaagaagaaaaggagaaagaagttgaaaaaagtgcagcaactgaaacaactgcatcatgaagctgaaaaacctaaatatgtaaagaaggtcaagaaacttgttccaaaggaaaatcaaggggttgatgaaaataaggctgaaaattcaactcaaactccagttagtactccaagcaagactacaagtaagacacaagcagcaccagcaagtgcaagtagtagtaaaaaggaaaaagaaaagaaaggatttttcagcagggttaaaaaagcactttcttgaagatatattatatttcaatcaatatatccgtgctttaagtacttatcgtgtttaatactcaaataatccgataatttttttgtttcatgtctcttattttaagttttttttcctgtcttcctttcaattgagttcaatttcatgaactagtttctgtatgtgtgagtgtattgtgtgttctatattattaaattttataactatataattgttactctcgttttaataattaataattaataattaataattaataattaatatgaagatatagacgtcatttgggaggacttaatgatattatatcaggattggaggcgcaactccaatagctcgcgtctatattaatgacgaaaacattttcaaatggggttatatcggagttttactgtagacattaatagcatcttagcttttgtaagaagaaagataatccagactttttctttattatattataattataccttatttccgcaccgagtaccctgtatacatttccttgacatgatatattaaataaagtttgtttgataacgcaataatagacaatagagcaagtaaatttacgataagtgtaccaaagactgttcgatttgatacatataattaataataataattaattattaattaagaatatataacgggacctgcttaacaatattgtattaaagtcataaagataaggtttttttcaacaaatactttgaaaattaaacgatcaattggatgtgattagggaagatctttttggaaatttttttcttgtagatttaaagaaagattagttatattagggaagaatgttttaagtaataattgtactgatttttattattagtagtattacaagagtgatcaaaggcttattattatttattagatctattagcagtatatataacgaatcctatcaatggtatactaagatcgtatattgatagtatacgtattatgttaatgtaataattttattgataacaataagagaaggaaaataaacaatagcaccggttttaattgctagtgcttatactaataatttatcagtgatctggggcattcatgcatcattgttgacgtcaagtgagggtgaaatttttaaaatttacgaaaataatataaatactaacaataggtaccctatattatttgaaacatcttacattcactggaaactgtcttagtggcaagtcttagcgctgtcttggctattaactataaacataaaattattttaatttcttcactggaaaagcttcgatagggtttatgatttataaaatattcaatttaaataaatattttattccccccattaataatgcatcagtttcctgtattttagttaattggtgattggaaatatattatttttaagttatgttagttgttttccatttttatttctatttctattttatattactttattcttaatattcattcactaaataatggattctcaaaacagatgtgctataacatctctattaaatgatgcgccttcatctacaaatacttctttaaaatcttcaacaaattcttccgaaatctcggctatttccgaatcttcaatattatcaccactatcagataattcaattaatgatatagatattaagaaagaacatcttgaacatatcgaacatattgaaaatattgaagatattgaaaatactaaaaattttatcaaaaaggaagcaaaaattggtggtaagaataaaattgataaaaatactaaacctgaaaaaattgattgtaaatggatcaattgtacaagatcatttactgatccacaaaaactttatgatcatttatgtgattttcatgttggtaggaaatcaaataaaaatttatcattatcatgtaaatgggataattgtaaaactattacttcaaaacgtgatcatataacaagtcatttaagagttcatataccattaaaaccatattcttgtaatgattgtgaaaaaaaatttaaaaggccacaagatttgaaaaaacataaaaaaactcatattaatagtgaaattaagaaacgtcaaaaattattttatgaaaaattatctttattaactccaatacaaaaatctgaatttataaagagtaattttaatttctttgaaaatttagatgataatactaataataataataatagtaattataatcataattatcaacacataataaagaaagaaaatacactaatttataataataataataatattaatcataataatagcaatgctattaatataaataacttcaataataattcacaaattcaattataatgcaccaccacaatatatgaattttcaacaaaatcaatcatatactcatttaatgtacgttcctgaaaaacaacattatcaaatgatatacccataccaacaatttcctcaacaacaaattattcattttcaaccaatgatgatttcaaattcaaattcagcacaaattcaaattctagttcacacacttcaatttcaaatctaaattcaataagtataccacaaccacaacaacaactacctcatcaacaatataatttacaactaccaccaactcaatcatctcatattcaaccccctcaacatcaatatcaacaatatacaccaattccagccccagcgcctgctactcaacaaagttacattcataatgcttatccaactcataatgctaataagttttaccaatcaatatgaaaccgaaaccgaaatcgaaaccgaaactttcatataacttaaaatagtgccaagactgattttccttctatattaccgaaaaatttaagtatttaccggcgggatgtttctcgtccccccccttatgaaaaaaaaatttgaattttttacgtagcaacaagtcattgaaatgcctcaaatattatacgaacaataacaagttcagtatatctgggttggcccagattaaatttacgtatataattgcttaaaatacattgaaatacaccgtatgattctttttatagttaaatattctaaagcttaatgaaaaaacttaataaatctgtaataatttgcgaagtgtaaatgtaatgcataaactatatcaactgcgccacatcaatattattataatattattttctgcgccacacaatataattacgtaagaatgttcattaataacatgatatatttagttctgagattcatttaatgattttgaaataacgactatcatgaatattctcttttaataaatgccacaagatcaatcaatatcgactacacacacaataacacaatcttcattaagattgcacctttctgcaactccagatatagaaataaatgaaaataataataattctaatgaaaaatcaaaagattcaaaaaaagttacttgggaggaagatgttatagataatgaaaatttaggtcgtaaaaagactaaaatttgttgtattttccatccacaagatgaagatcaatacgaattaccacctgattcagattcggattcatcttcgtcttcatcatcttcatcagattctgataatgatggtgatgaggggaataatgagggtaaaccaaacgcttatgagagacaacctaaatataagaaaaaatcaaataaacataaccataaccatagtcatagtcatagtcatgatcatagtcatgagaatcacagtcatacccactctaatgtataatatacgatcgatacataatcttataaataagtctatttttaataaataaaatgttttacttttctaaacaatctatacaaatttaaacattgatttcaagatttatcaataatccatatatttctcttggcatcttatatttaataagaccagcaaatatcacacaatttttagaaacttgctttaattcttcaattttaacattattaatattatcaccattattattaatattattattatcttggatattattattataatatgttaagtattcaatcaatcttctaatacatgtcatttcaattattaataaacttggtatatttttcattatactttcattataattattaaattcagaaatatatcttctaattttggatatatcattactatctgaaacaattggaattaattctaattctttaactttttccattattgaaatacatctattacttaaattattattctcaactccaattaaaaattctttgattatttcaaaaatatctaataatttttgacaattaattctgttcttaattgatgttttggataatatatcagttgatgaattataaatttttaataaattatcacttaatttaattatattactttcaccttcattttcaatattgtttaaaatttcggaaattgagtatctattattaattaaatcaattgagttaataaaatctcctaataatttctcaacaattgttaaaactgtatcatattcttcacttaattgatataataatatacaatcaattaatctaccttcttcattagccctttcagcggccttttctgctatgttatataaatatgattttgtatcatcaaggaaaattagtgatttcctatcttcaataataccaggaattcttgtaccagttttagtcaattttcctaaaagtaaaacaaattctctactttccaaaactaattctctgattgattccctacaaagttcaatttgtgattcctttaattgtttattcttttcccctccatcacttaaacaaattaaaaataaatattcacatgcaactcttggatcactaaatttaaaatttttaacataattaccaatcattctactaaaattaattgacttaaatccttcttcaccaatattcattaaattgtttgatttaacattagaatcagtttcatcacttactctaattaatccataataatttaaaatgattgctaaatgaattgaatcaatttcattaattgtcattgaatatttgattgcatcttcaaataatccaactaataataatgtttgtaaatacattggatttttacttgatacattaaatgcatcagatccaaattcaagcacatttttctgtaaatcaactaatctatatctttcaattaatgaatttgatgattcatcaatattagattcattaacagtaacattgatatcatcaccttcttcctcttttattaatgataaatgtaaccataaccaatcttcaatacttaatactattgaaggcaatgtttttctagctaaatcacatctaccaataattttataaactgcatatctgaaaggatcaatatctttacttgaatttttcatatattgattaaattcattgtttaaacgtccttgtaactcatcacttaattttttattatctgattcacaatatgatttcaaataaaatgggaaagacttctctaatttttggaatgaatcttcatattttgaaactaatattattgcttcattgtaacatcctgctcttaataaataaaataaaattgcccataatggtacaccattaacaattgtcatatttggaattttccaagttttttgcttagtttttaatgttttatcaatataattcataactttatcaatatttggaattagcagtttattttgatctaaaattgacgttgttgttgttgttgttgttgatttattcaaattattattgaataattcatcaatatagtctctaaattgagtttctaaatattctttacttttcaaaacaatctgttctcttaaattgattgattcaaagtcagttaatttagaatatgttgcattggtaaatctaccaggtcttaatttatcatcaatattgtcatttaaattttcacaaaatgatcttaatattataaaactttcttgaatttgactatttttattattattcatatttgatttgtaaaatgatgaaagagaagttgcaattttataccattgtttgtcctttcttgcttcattaaaatcataaataatttctgcattaccttcaaatttctttctcaaaccatatgaaacatttgggttcataatggaatctaattgattagtactttggacatcattaaatttaaaactattagagataagacttttcgtcttatgtgcaccccaaatcaattgtttttcaattaattctttattggtgaattttttagtctttttctcaggtgattgaagagtaagactattattagatggctctctttttaaaacatttgctaattgatcacatagttctttctttttctcattccaatctaaattaatattattattcacaaatttatcgaaatcttttgcagttgcagataatgaattttcaattgttgataatatattttcatccttttgtttatacatatagtatcccaaattggtattcttaatattagaataagtattatttctattattggataccaatgatgaattatttgaaagtttatttttataatcgatattatttgatttagttattttttcaagtttttctaaatcgtcttcaacttcttcaactgtaaatcctttaccaattaaaagataatgtgcctttgtatacatattaacatcattatcagttttattatattttcttaaattatgagcccgttgttgtaattcttttaaacttaaatgtaaaatatcgatatcatctaaacgtctaggcaaatttttagaagattggaccaaatcattcaaaagtgatgccctacctgccttatcagcaattccgtctttctttattgctgttagagctgcttgagacattgaaactacacgctatttgaatgttttcaacaagaaagtgacacactccaaagggaaaccatgtatgtttacgtttcacaatatgaaatacaaaaaaacaaaaaaaaataaaaaattcctttaaaagggcgggtaacctatacattctatttattctatttacattctatttacatttacaagattaatacactctttatcttctatcttcttctataatattagcaaataattgatttataattgaagttttcctccagtattgatttggatatttctcttgagtcagattatgtgctttttccttagaaattttcatatctgcaacaggacaaacactttcaaatgctttttcagatggaatatccatatcaactttaataagttcactgaaatgtagtttatcttcatcgtatatactctttaaaactgtagcacccctcttagaaatattatcctttcttaatctattaccagtttcatcaactgtatcatgtgttttatatgcatatttgaaaatactttcacgaattataactcttgtaccttctggaacataaatttgaaatagtccttcaacattatcaactgaacttgtaggttgaattgataaaaatcccaaatcttgaataacaatatcaatattaccataaaatggtggtataacatatcttactaatttatcaaatgcttctggtttaacaccatatcttttaccaatttgtacaggtctagttttattgatctctgcagctcttttaaaatctgcatatcttgcttcaaagttactttctgatctattaaatgaaaggcatgtcttcataacaacattctttggtggaactaaatagaaaaatcctccgtatgaatacatacttttaccactgaatatttttggtcccttaacctttattttagtatatctgttacgctgttctggcgtaaattgtgagtatctaagtttttttctaataactccaccaagcatatgtgaataaataccaccattttgtgggaaaaatccaggagtatcaaataaattatatttacccttgtattgaaatttttgaacttctttggtgaaacctggaatatagtatgtaccaggtgatgcaataccgacattctctaaataactcttctttttattttcaatttttttaacaaccttatcatctaatttaattttatattcagaagcaataattgatttaattaatgtacttttacctgaatttgctctaccaacaaaataaacatcacctgctggaattttattgataaatgggttaatatcccatgcctttacagatgagacaaggaaaaacctttgctggatctgcattcatatattcctttaaaacatctcttacatattccaaaccagttctttcaatttgaacttcctttctataaaataaatcagctttagtgactgcatagtatatactttttggatctctatttttcataatttcactattacatgataatgggaaatcaaaaagtgaaacaacatgaacaactgtagcattatctggtatattattcataacactatcaacatcacatccatgaatatcataaataccatgttgttttaaattttggcaacgtttacattcaattaaatgtgtgtatttttcaatgatttcatgtttcttttgttcgactttaacttggaactcagaggtgacaggtccatcttctatactgattcccatctctttcaatatactttcatctaaattgttaacatcaaccgtattgttctttttagggaattttaatgaaactttgggtaattcaaaatacttatcatcagaagaattattactttgtaaagatgttgtaccacatgttttacatttgattgatccattattttcgagttgctccattattttcttatattcatttgttgctaattgaaaatcattcgtatcctttaatgtctccggacgaatagttataccatttttagcagttttacggaaaaattcccaatttggttttatattgacattttttgaatcaatttttaatatcaaagagttaccgaattgtcttctaaacacccctccaactctatatcgtagtatacatggtctcattgataatcgatgccttttgtcaccatgaaaagtcttaagttaatgattgtaaaaaagttccaaggtgaaaaaatttgttagtaaatattcccacttacgtaatatcttcccaacatgacttaatgaacaattttataaactcttttggcgttattaatacaaatagtttcgaaataagctcgtataattaatatgaaatacaaatgatatataaaattgcaataacagagtaagttttataaaaaaaattggaataatgtgatataaaaaaatgatagataaaattcaattcaatcaggtatcaacttgttcgatgattgatgaataagttatctcaaaatgacaaaataaaatgaagataaaaatgactttttttctttttggtaaatatgaatattaatttgaaaaaaattaaatattagttagtgtaatataaggaagaaataataataagaacaattaagcatcaaagtgatttcaatttgctggtttcttaggaactaaaactttatcatcacccttttgtggtgcaaaaatagtggtatccttttcatgtctatcaattcttgccttttcgaaccattttttaacattgaataaaccactaattgaaaaaccttgaactctgaaaagatagtaaccagcacacattgcaaagaagttaaagatgatataaatccatgcaataccaaaatttctccaatgttgattgtaatgaataccatattgttcaacaacttgtgattgcatagtatatggacaatatttacattgtgaattttcagttggatttgcaacataaccaccattattatcaatataagttgataaataatcaccacaagtttgaccacttggtggatccatgatattatattctctaaatgcacaaactaaaactctatcttctaaaattggaccaacaaaagcttgaacgaaataagtaaatggtgatgcaacatacatgaatgaccagaattttggtgaccatttctttggatttaagataccacagaataacaacatagatgcgaataaattagaattaatcatagaagctgatggaacatctggtgagaaatataagacagctaaaccgtatgagatgaaatagattgggaaaattaaaacataaatgaagaagaagaaacctgcatgtggagcattacctgaatattgtgctggccaatagtaacagatgtaacagaagaattcacaaataacagaccagaaaatttcaattaatgtatgggataacaataaacatgaccagtggaaagtatttgataaagtttctctgacttcaaacaattctcttgaatcaattgcaaagacatgagattgattaatcatagccaatgaaattaataataacatgaaaacagatgagaaagcaccttgggcaccagcaattgtatgatcaaaaccgacataagataaaccaacgaataaagcacatgagacacattccaggaatttagctctaatataaacaggtgatctccagaattgtaaataggttctctttaagacaaaccagaattgttgatcataagtagttgcatatttagaagttaaatcaccaactttatcattaattggtctctttggtaattcaatatgaagtgtatcaatttcttcagtaactttagcacattctggtgaattattccataattcagaccaatcttgagcagcagatgcagttgcaccagcaccaatacaatttaaaatatattcagcaggattttcagaaacaccacatttaacaccagaataacgttcaaaataatctaacataatagaagaattttcaccaatatcaccaaaataaacagttttaccacctttctttaataataataatctatcaaaaacttcaaataatgttgctgatggttgatgaatagtacataaaatagcttgaccagaatctgcaagagctttcatgaattgaacaattgaccaagatgattcagaatctaaaccagaagttggttcatctaagaacaataataatgatggctttgcaactaattcagttgcaatagataatttctttctttgttcaacatttaaacctctaccaattttaccaaccattgcttcagcatatttatccatacctaaacaattaataattttttcgacataatcatatttttcactttgtggagttgtctttggttgtcttaaatctgctgcaaatctcaatgattctctaacagagaattcagccatatgtaaatcttgttgttgaacataaccagttcttctcttaaatgaggaatctaaaggtctaccattaactaacatatcaccagtgattgtaccaaaagaaattctttgagctaagacatttaataaagttgttttaccagcaccagattcacccattaatgcagtcatagtacctggtttaacataaccttgaattgaacataataattgtctggttgcaccttcataaggaataatataatctaagtttttccaagagaaaacatctgcttcactgataatcttatctaaatcagcatctggaccatttaatgcaagcatcatttcttctctagtagcaactttaccatcccattcttcaccaccagcggcatctggcatatgacctctcttgaataaaagcatatcaccaccactttcaacatttttaataaattcagccataaaagtattaacagcaatgaaacctgcagtccaacaaatattaataccccagtatttccaaacattatgccatctaaagtcaaattgtcttgaaatatatgaatcaccagaaacccaatcttgaccttgaactgaaccagcctaaactacaaatttgatttgctagtgaaacattttcataacctggacctgaaggaactaattgtgaacattgcataactttaccatggaattcactacccattaatgaataataacaataaaacattggatttaaataatgaatccatttaatccaatgatgcatacttggtaatggtaacataaaacctgcataaacacaaagcattaaaacccataaaccaccaacggcatgtagcagtagtaccatctttagttaaggttgcaactaatttgaaaatgaaagacatacattgttgaattgttaaaaggaaaaggaagaacataaagaaggcacctgcttcatgttttaaatttggcatccaataagcagttaatgacaaaataataactgcaattgcctttgttggcagttcagtaatcatttcttgtaaagcttcagcagataaatggtacatggaataagatctttgtttaaccaaaatttttctgtttgtgaaagaatttgcaatttcagctaaagaagttaaagcacagaataataaacaatagaataaaataccaccacgagaatatgcaccaacagtttcctttggaatatggtaatacattgaaccgacaacaaaacctttagtaacgaaagaagataaataaaccatagtataagtaatatcaccctttgttctttggaaacctctaataactaaatatttcaattgagcaaaataattgacaacaaagatagatttatttctttgaccagcttgctttctttgattagttgctaattctaatcttgctcttgtttcttcagcattatgattaacaataaaatcatcatattgagcacataagtcttgatattcaggggaagctaaccaatattgttcaaattcatcaggagtttcagggattttaccttcaaaaccaggtttaatttgtcttgaagcaggagatgtaacagcagttaagaattctggagcagtcattcttgaaggttttaaataacccattttttcaaaataatcaataccatttttagcaggaccccaataaatttgtctacccttgtagataactgtaactttatcaaataattcataaatgttttgacctgcttgataaatagcaaccaatgcaccacatcttaacatgttagttgcagttcttaaacattgagtaaattctaaagcagttgaagcatctaaacctctggttgcattatcgaaacaatagaaggaagcattcattgataaagcttcaacaatggaaactctctttctttcaccaccagagacacctctaacgaaatcattaccaactctagttgaataagtatgagttaaaccaaaaacggtacaccataattttaacatattatcaacatattcttctcttgccatattatcaactcttgtctttggagttttagttcttaaagcaaattgaatagtttccttaacggtaatataagggaaatggaaatctaattcaggattgtaaataatgtaacctgtaataatagtaaaaaaagagaagggggaggatattgttagtataatgtttttggaaaataatagtaataagaattagttgaatacatacctttatattttttcatcatttcatcttgatttaaaccatcataagaaaaatcaccttcaactttagtaaaattttcaatttcaccagcacaagcttttaacaatgaagaacaacctgcacctggtttacctaaagctaaaactaattcaccaggttgaattatacccataaaatttctaataatttgtctttgtaaacgagaatcttttttgaaaaactttaaaggccatttataagtatctctaagcatttcaggaactgaaggaccataagcagcagatgcatcaataccccaacaagttaaatctttgaaagctaaaccagaatgtgctgattcaataccttgatctgaagctctttcatgtaaatattttaaaagtaattttaaatcaaaatcttgaggattaatttcaaaatgatctaaatcagcctttgtctttgttgataaaattctagctaaagattgaactttttcaataccttcaggggttgataaaattcttgataaatgttgagataaattttctgcatttgattgattttcaatatcatcaattggattaaattgtttaacttcaccaggagatgaagaatcaatactttcagtatcatttaaactactatgattgtcactcattttagttattattgatattgatgatacttttgaatgatatcagagattcaaaaaaaaaaaaagtatagagtaaaagagtttagaaagcacagagcaaaataaaataaggaaaagggaggtattaatagtattacaagagatataggaggataccataaggtatttatacgaaacagaattaagtcaagataacattaatcataaaactccatcgtatatagactgtcttcccaatgaaaagcaagaattacaggtgaaaaaaacaagcatcaaagacacaaacacgcccaagagcacccttcccgaggtatatccctcaatcgatgagtgataaaattgaaaataataggagaaaaatatggaaaatgagaaaataataaaatcactatctcaaatacttcctcgttaggcaatatctccgttataataggaatccgcgagatttatttaaaccccctattatgtattatattcatattattaggtaatccattacctaagcatcaataccgctaactccacaacaacaaaaattttcgtattccgagtgaaattattttctttttcttttctttctgtgagagggcttataatattgattgactttctttgttttaattatctcacagtcccatcgacctttgtattactttttttattttttttattttttatttttttattttttctttatagtcccatcgaccccacacaatgcttaatactttggtggctcaacttttaactattgtaatactgaaatatcaatactgaataattgttgaatagaataatcatttgaataatcctattcataatatgattgattcatttaaaactaatgtatttaatagaaaactatacacaaaatacagtataatatactaaaatatattcattataatttaaaagtggaatataccctgtctttatacacttttattatataactaagtaatatgtaatacacagatacctcaactccgctagcctccgaatataatgttaatcatagccttcattcatgcttttataaccccatataaacatcacataaccatcatcatcataatatcatcatatcatcatatggttatatagccatatatcatagtaagtaactcatttagccttttttattcagccatattatttatcctttcttgttttccgacttttatttttgttactattactcttactattattattattattattactgttgattagaatagtctttaaaacttgtttattttcctttaaattattctcaacttttcttgcatcatcaattttacgtaaataaccaccgaaaacaacaacttctgcaattaatgttaaaattgaaacaaataatgataataaaattcttaatccataattatttgaaattttataaatattaccactccaataccaaattgcatatccaactgaaacaactgtaaggaaaatattgaaaattgtcgttaattcatgtttaatagtctttatttcattaatcggattgcgtgatttatcattatttaaaaatttatattctcctattttaccttctgtcatagtatctccaatatcattttccttaacacctcctctatcatctctattacgtagtagtgatctgtaatttttctcatccttttccttttgtaatctctccatcaatattaaatatccttcacttttcttaactggaactaccagattataaattggtattaattcactcatgtatgtcataatgttaatatccttattatcatctttcttagtaatttcaactaactcttcaaatgttataccaccttcattctgtattttatctcgtattgacacatcagctttttccaataacttctccactttactaccaattttatactttaaaaccattattagcctatatgcatatatcacattcaaagaaaaaagtggttgtaaaatcaaatctccaaaactaaacacggaaataatttttcatagtaacgtgaattttttggcgtttccgtactaaatttgtgtactgtaaaagtagactttttggttttacttccattgattatgaccaatccttataatcatccatatcacccatacgatgttcagatatctttaatgaatgcagtttataaaactttaaaaaatggttcaaaattaggtattttcgaatctccaactggtacaggtaaaacattaagtttaatatgtgcttcaatgacttggttacgtgaaaatcaacatattaaaagcaatacaatagtagaggaagatggaaatgaatctgatgatgaaccggaatgggtaaaacaggcttatttagagaaaatcaaacgtgaaactactggtaaaattattgattatgaaaattatttagatggtgtagaacatgatggtggggtaatcgtcattgaacagggtaaacgtggaaaagttcaaatacataaacgaaggaagaataatggtaataaggagaatgagaaattggatgaatcagatatattacccgttgattatgataatgatgaaggaagaaatggtattaatgatgatgtaagtaaattacttgatgaaatggataagaaagatattgaaattgtcgataaaaagataaataatgaattgaaaatttattttgtttcaagaactcattcacaattacatcaatttagtaatcaattgaaattaacaaatttcccatcatcaattaaggaattgaaaaatgaaagaattaaatatttaccattaggttcacgaaaacaattatgtattaatgataaagttaaatcattaaatgatacattattaattaataaacaatgtattgatttacaaaaggagaaagaggttgaaaaaaaatgtcaatttatgattaataaacaacacgatgaggatctgcttacgtttaaataaattcgaagatttaattatgacctaaaatttatgatatcgaagatattgtagaattaggagaaaatttaaaatgttgtccatattatggggttagaggtgatattttaccatctgaaattatttcaatgccatatcaaacattacttaataaagaaacacgtgaaatgttgggaattgatttaaccaactctgttgtcattattgatgaagctcataatttaaatgatagtataatatcaatgtattcaagttcattatctaaaaaatcattagaaagattaagaaattcattaaaaagatatattaaaaaatttatgctaaaaatgtcaagtagtaatagaattcaaattactaagttatataaattagttaatatattatacaagtttattgaaagatgtatatcattgaataagtgttcaaaatgggaaatttatagaaaggaatgaaatatttgatgaaacaacagacttactaaatgttaatgaattagatgaatatttagttaaatcaagattagcttataaattagaaacgtacatggaaagaagtgatgaaacatataagagtaaagaaccattgttatatgaagttaaacaattcctatactcattgaagtaatccacaaaaaaatggtagattcttctgggatactagtaataataatggtgatgttatactgaaatatcttttattagatagcagtgaaatatttcaagatattgttgaagaaagtagatgtgttttattggccggtggtacgatgtcaccaattgatggtgtcattaaatcacttgcacctaatttaccaaatgaaaagatagacacattcagttgtggacatgtcattccaaaggaaaatttgaaaactattgtcaaaagtgaatatgaaggtgttaagttaagatttactcatgaatatagatacaatgaggaaatggttaataaattaggtaagttgataattgatacaatgatgagagtacctaaaggttttgttttgttctttacaagttactcatatttggataaagttattaaaatttgggaaagaactggagtattgtcaaagatgaaaaacattaaggaagttttcatcgataatggtagtgaaaatattttcaatgagtatagttccagtattgaactttcagataatgctaaaggtgcaattttattttcagttttaggcggtagattatctgaaggtattaatttcagtgatgatttagccagaatggttgctattatcggtgtaccatttgcagatccaagatcagctgaaagcatagccaaaaatcagtttggtagaaattacccaatggaagacgctttacgaagagtcaatcaagcagttggacgtgcctattagaaatatatcagactatgcagcagttatgttcattgatgagagatatgctcccaacagagaaggtggtagcaatggagcatttcgttatgtaagcggatggatcaagggacggattagctaatagagagaatattgaagaattttttagaagacacagtgttaactctatttaaggctttccaacgtttaagtagtttaccttttgtatttaaaactttatattattctttatattattcttaaaatatacacaacgttcatagaaaatatatatttaaataaataatggactttgcagcagatcctacattaaacgatattataacccacgatactttacgttggattttcgttggtggtaaaggtggtgttggtaaaactacatcatcatcatcagttgcagttcaactggcacttaataatccaactaaacaatatttattaatttcaactgatcctgcacataatttatctgatgcatttgatcaaaagtttggtaaagatgctcgtgtagttgaaggtttagataatttatcatgtatggaaattgatccatcatcaacaatggaagaatttagtgcatcacaaagtgattcatctgatccaattaataatgttttagcagaagttacatcatcaattccaggtatcgatgaagcattttcatttatggaagttttaaaacacattaaaaatcaaaaatctgatgatgaaacaatcgttaaatatgacacaattgttttcgatactgcaccaactggtcatacacttagatttttacaattaccttcaactttagaaaaattacttggaaagtttaatgaaattacaggtaaaatgggttcattactttcaatgatgggtggtgatcaaaagcaagaaatgtttaataaacttgcagatattaaggaacaagttacagaagttaataaacaatttcaagatcctgaattaacaacgtttatctgtgtctgtatctctgaatttttatcactttatgaaacagaacgtttaattcaagatttaatgaaatataatatggatgttaatacaattattgttaaccaattacttttcgctgatgaagatgaatgtaaacgttgtcaagcaagatggaagatgcaaagaaagtatcttgatcaaatggatgaattgtatgaagattaccatcttattaaaatgccattattaggtaatgaaattagaggtttaccaaatttgaaaaaattctcaaaattcttactcaccccatacgatcctataaaggataaggatgttgtcttttcaattgaagagagataggttatcatatataagcatatagaggtgtatataaaattaattccatatatgtatttttgtaaaacttgtcatttaccactaataattgatccatcattaaatttatcaaatgcacaacagaatttaacgcttaactataccgcaaatacaacatcatcgccaccttcagttataataccaaaggacagattagataagtttaatactgcaattggtcattcatttgtatatttgaataaacatgacgatcatgaaaaaccagaaataagttcaagaattgataaatcagaaaatatattcgatataatatcatctaaatatgatattgattatcctgtatgtaatgattgtgcaatttcactatcaaataatatgaaacataagtatgaaacattaaataatgagaaagaagtgtatttacagtttttgaaaaacttaacatcacaaaatcgtcccagtaaggggaaaatagaattgacattagaggaacttgaaacattgaaacaaaatgaaaatgaattaatgcaacaaattgaatcagaggataaattacatgaagagctaaataaggaaattaatagtttaagcatggaaatagatgaattaaagagcaaagagttagaacgatgtaaacttcaaaaccaattacatatggaaaatacagagaggttaaacactattgataaactacagaatgagtttaattcaaatatggattttcttgatactttaaggaaaactaatgttttcgataacttctttgaaatatcaaccaatggtcagttttcaacaattaacggtctaaggctaggatgtttgtctgatgttaaagttacatggcatgaaataaatgcttcattaggtcatattacccttttattatcagcatgtcttaatattttagattttaacttacaagattataagctaatacccatgggatctaattcaaaaattgaaatctataaaacaaataaaaaattagtatatcagctatactccacatcagagttttcattaactaacttattctcacatccacttgatgatggaatgtcagctttgttaaaagttattaaacagataggcgattatattcatacacttgataccacattcattctcccctatgaaataaataacgatactattgcaaattatcctataaaaccatcagcaaaaagttgggaaaattggactgctgcttgcaggttactgttatctaatgtaaaatggattcaaacattttgtattgcacattatgaaaatatcaaatgataagaaaattaataatataccatttcgggtaatgtaattaataattattctacatgaaaaaatttcatttaaagttatttcaattattaataatgataatataagttctttctttttgtacagatatatacattcactcttaacgaacacacatgactgaatgtcaagttaagacatcagatggtgtttattcaccatttgatagagacaaactttgcacatccctatcggagatttgtgtcagccgacatttggaaaacgttgatatcgctgacggagttagtaaaatccagtccggattaccagatgaaatatcaatagaccaactggttaatcttattgcagaagtatttgcatctatgacaaccatccattatgaatattcaaagcttgcatcagttgtattatcaaaattattacataaaaaggtaaactctaagttttcggagaatttcaaaactatccatcatcatgaatactcaaatcccaacaggaaaaagaaaagtttattctttgatgatgtttataattcagtcatggaaaatgcagatatcatcgataaggccatagttcatgagagagatttcgatattgattattttgggtttagaacattagaacattcttatcttatagttttggaaggattaatacatgaaactccacaatatctatttatgcgtgttgcattaggtattcattacaataacatagatcttgcaatagagacatatgaattaatgtcgcaaaaatacttcattcatgcatctccaacgttatttaattcaggtatgaaaaatccatttctttcatcatgtttcttattagcaatgaaagatgattctattgatggtatttataaaacattgtatgacacagcaatgatatcaaaagcatcaggtggtgttggattacatatttccaatattagagctaatggaacttacatcaatggatcaaatggaatatcctcaggaattgtaccaatgttacaaacatttaatgctaccgcaagatatgttgatcaaggtggtaataaacgccccggtgcattttgtgtttatttagaaccatggcatgctgatatattccaatttttagatttaaggaaaaatcacggtaaagatgaaatgagaactagagatttattcttggcattgtggataccagatttattcatgcaaaaagtggaaagaaacgaagaatggtgtttgttttctgaagacatggctcctgaattaagtaactgttatggagagaaatttaataacttgtatgcaaaatatgagcaagagaaaagatttataaaacgtgtcaatgcaagaaaattatggcatgcagttttagttgcacagacagaaacaggcaatccatttttattatacaaagatagatgtaatgagatgtcaaatcaaaagaatttaggtgttattaaaagctctaatttatgttgtgaaattattgaatattcatcgcctgaagaaactgctgtttgtaaccttgcatcattagcattaccaacttttatcaataatggtgcatttaattttgaaaaattacacacagttgctaaaatagttgtaagaaatctagatagagttattgatgtaaatgaatatccattagaaaattgtaagaaatccaatttgaaaaatagaccaattggattaggcgtacaagggcttgctgatactttcttcaaactgggatttccatttgattctgaaaacgcaaagaaactcaatattcaaatttttgaaactatttatcatgcagctttggaacaatcaagtgaacttgccattgaaaatggcaaatatgctagttatgaaggctcgcttatatcgaaaggacgattacaatttgatctgtggggagtggagccgagttcattatggaagtgggattcattaagatgtaagattagagagaatggggtaagaaattcattattagtggcattaatgccaactgcatcaacttcacaaatatttggatttaatgaatgttttgagcctattacatccaatatttacataagaagagtattatcaggtgaacatcaagttgttaataaatatttagttgatgatttgatgaaattggacctttggaatattgaaatgaagaataagattattagtaatgatggatcaattcaaaatattgataatataccagataatatcaaagaattgtataaaacggtttgggaaatttcacaaagggtattaattgatttatcagcagatagagcaccatttattgatcaatcacagagcatgaatttatttatgagtgatgttacattttctaaattaacgagtatgcatttttatgcatggagaaaaggtttgaaaactggaatgtattatttacgtacaaaggcagcagcaagtgcaattaagtttagtttaagtccaatagttagtagaaataaaaggaaaatgaaaacaattgataatgttgtaagtaaatttcaaaaagttacacaagcagttgatcaaagtagtgatgatgaaactgataactcatcatataatattttcagtaagtcggtgataagttgtaatttaagtgatccagagaattgtgattcatgttctgcatgattgtttgtatataaagagaagacaggattctcagttgcgtgtaaatagtagtatttaattaatgtaacaacaataaagctttgaagaatagatgaatgaatggatttagataaaaaatattacagaatataatttggttaaataaattacttcttttgaaaatctagtttaaatgtaacagtttcagctgaaccactttgaactttaaccttttcattagcagctggtgaatgatcagcagtccaactatcaagaccaccataagttaaataaccatcagaggaaagatcaaattgagtagcagtaactgatgaactacaagttaaatcaccactaacaaaaccgcaataaccctttgaagattttaagttataaccaccaaatggagcggtttcaagatgataagttgcacaagtaccaccaacaaaccaagagccatcagagattaaacaaccttgttgaccttctggtgataaataaccattaatagttggttttgaagaagctgatggtgaagcagaattacttgcagatggataattatttttcaatggataagaaatttgatcaggacaagaatttttaccaataaaatcaattggctgataatcaccatcaataacacgaccctttaagtgataataataccaaatttcatcaattgcaccatttttatcacaagcaaaataaacttcagcaccgaatttagcattaagtgcagctgctatatcagttttagcatatttaacatcatttgatggaacaataccagcatctgataaccatttatatgaaggtaaattttcaaacattgaagtaacttgtttaaaaaattcaacagcacctaaattagttgttttatcagtgaaacaatcaggttttaaagttgacatacaagttgcatgtttattaaattcatgagtccaaagatcatcatcattaccttgataatctttccaataagtattcataaaatctaataattctgtttcattaaaagattgtaagactgatttaattgaattaacattcattgaatcatcacaataagatgaataagaaccatcacaattatctggccataaaccatgaattgtccaactatcatttggaccagttgaaggattataatcccaaaattgagtttgaagtaaaactccaccaggtgcttcaacacaacacgaatcaatatttgaagcatcagttgaacaagataatggtaaatcagcaggacaagatttgaaaatacttggtaattgagaaggaactggaccagcagaacttgaaggttttaaagatgatgaaatcggagctaaagatgacggagcggatgaggaagatgttgcagcagcagaagaagaagataaagaagaagatgaagcatcaacaggaagagtgtaagtgtattttggacatgaaggtggttgatcataggaagagacaaatacagcattagcagaagctaatgatagcaagatggagcataaagtttgatagttcattgttattctatgataaacaaaaagtgaaaaaccaactaaagaatcaacggtttcaataagtgggaatccgccatgtattaaatacttgtaatcagtaacagttactgttacaattgatacaaagacacggttactaaaacaataacatcaaaatgtaaataaataaatacaaagaatgaaaagaatgaaaaaaatggaaaacaaaattaaagataaggtccccccacctgcaccagttaaacgttttacgtcaacgtgtttattacttaagtgttttattatatacttttactatacttttactatacttttactatgataaatacaaatgaaaaacaacatcaccgtcaatgccaggacgaataccaacctgttggaaacggccagggactttatccgcattccatttactttcacctccaaaacttatccattgtttatctttatccttattataggaaaattgcattggtttaacattaggtccacatgtaaatgtaccgtctgtatcacttactttacaataacccttggaagatttaatattatatcctccaaattctgccttttgtaacgtaaatgttgcacaactacccgatgtataccaattaccattacttataacacatcctggttcattctctaattttaaatatcctttaataccatcctttggtttacctggtggatttggacctggtggtggagttggtggtttaaatcctctttttggtataaatttaataccttcatttggacattgtgaattaaccattgctggtattggcatatattctccatttataactgatcctcttaaatgataaaaataccaaacttcttgtaatgcttgatatctattacatttaatataaactggttgtccaaaatgtgcacttaacgtatcctcaatttgttgtttactatatgtttgttcatttgatggtataataccattatcacttaaccatttatatgttggtagtctttcaaataattcaacactttttttgaaaaaatcaacaacattttgattttttttatattcaccttcataacatttctccttaattgtactcatacatgttccatgcttattaaattcatgtttccataatgattcatcatctccattataatttttccaaacactttccattttctctaataattcatactctttatgttcctttaatatatcacgtacattatcaatttccatcgatgaatcacaaaattgttcaaaagatccatcacatttatctgaccataatccatgtaatgtaaacatatcatctggtccaattggtggataataatcccaaaattgtgtttgtaataaaactcctccaggattttcaaaacaacatgtatctccatcatatttctcatcagtacatgtaaacggtatatcaaccggacatttctttaattcagccttctttaattctaatgttaatttatcatttaacaaacctttttcaaattcagcatattcaggaatattgagtgaatgaacactgttaatcaatactaataacgtaacactcaacttcatagttgttaaaatagattatcaacaagggcaaataacgtaactttgtaaaagaaagaacatgaccaataaataaagattggtataatctcctcatcaccaagttggtaacaatagaatacgtcaaatctatttttataagcttcgctgctctaattggatattgataagataagaaattatttcatcgatattttttcatcttttttatctttttatctttttatcttctattttactttatagattatgtatttatatttacacaaattacacctgaatggaacatctattcatcatcctcatcctcatcgtcttcttcatctatctcaatttcatcatcagatccgaaaacattcatagttttcttaccatttttagcatcctttgcatcagcttctaacgattcccttaataattttaatttttcctcttttactaatctttgtgttgcaatatatgcaccaagtggagttttcttccaatcaacatcttgtaaaaatttacttactgcaactttattctttggtccatattcaattttacttctttctttttcaatatatttactatttgcagttaatttatcaattaatgtattcaattgtctattgaattttgcattattctttgctgcattattctttttaagacttcttctaaggaaaattaatggtggtgttgttaattctgggtatgcagcagatttacaatataacacaaaatattcaccaattaattcaattaattcttcacaaactccatcaacataaacccttgtatttaaataagctttattaactttaatattactctcaaaatcaattgctggtaaattttcacgttttggaactcttgaaaacatacttgaatgaagtatttcacttaataatgggaataatggaatataaactccagtactttgtgataatctaattaatgatctaattaaataaaatcttaatgggaaaaattgtgcagttggaattaatttaattgtaccgatggtaacttgaactaatggataaattaattgttttaattgtgattcttgatcatcatcttccttaacttgaactgatataactcttgaccaaaaatctaatccatgacaaaatttccaattataaattgctttataactatcctttgttggtgtattaacacttgttcttaaatgaattgctaattgtctaataaattcaaatccaatttgatatcctaatacaggatttaatccaaataattcagccgctgaatttttttggaaatttaataatggtgttgtatgaatacttgttttaccacaattctttaagaaatttgcatatgttgatcttaaaacaatttctagaacggattttggatattctttacatgcattattcatccatgcaaatgctgaaatttcagtctctaatgaacctgatgaactccaaattaaaacaatcgaattaacaattgcctttaataattttctaaatgaaattaagtatggtaataattcttggactgattgtaaaactaatgcacaagtttcagtgtttgatgcatcctctaaaagtgtaattaatgatggtgtatgaactttaataattgttgataattgtgcaactttctttttattacctgaaatatttctaataccattagatgaaactttgaatggtgtgattttttgaactgctaatggaaaatcttgtaatacaacaaacattaaatttttaaaagctttttcatctttaacagtatatttgaaaatatcatcagaatctgaattaattgctgatttatatgcgataacaacattttttaatgtcttaattgatggagtatctgattttaaatcatctgaccatttcttaactaattgaacaccaacttcaatagattttttattcttagtatcaacatccatcttctcagtagaatccattttcatttgatccttcttcatcatcatctcttctcatcatcatcttcttcatcatcgctaattgcatctaatggattaacaggattaaaatctaataaatctttatcattattctttaaatagttatagaattcaggatcatccttagctaatgcatccatatcaatatcatttttttcatcatcaacttcttcctctgatgaagatgattcttcttcttctgcttctgcttcttcttgctttttagtttgtttcttggtttgtttcttttccttcttcatttctggaagtttatcatctttttcaaaatattcttcaacatctacatcatctaaaactttagcattcttttgatttttatcaactggtccatcaacgactgatccttttttaccaccttttctttgtgcaattttcttattatgttcttgaactctttttctttcttgaatggtatgtttcaaatgtttcgattgaaacttcttagtggattttgtagctttagccatgattttccttgttgattgattaattcaaagataaaagtatagtaataaaagtacctttctttaggtgaaaaattattattttctaaaaatttttttttcatgcattgcataataaagtggaaaaaataaaatattttttttcctgcaaaatgaaaagtcgcgtctggtaggtgatggtatcttttttgttgttgttactgagcctgaatcaaagatcaaattgatattaaagacactgggtttatcttggagtaaggcgtatatacaagcaataaattaatggagaaggcagaagatatggtaagcaatgttttatcaaatgaattattggaatcagaggaaacttttgccaaacaacaatatctatatggagaaataaacccatcaccaatgaaacacgaaatacatgaagatatacccaaattaaacactaaattaactttccctaagcaaaggaagagatcaaacacaatggaggcgaaatattataaaatctccgataaggaaaacttgggtgttaggaagaagtatgaaaagaccatcaacttgtggtaaagaaggtatacgtcatttttcaactccgttacctttgagagtaagtttacaagatacaaatataccacaactttcaccaaatactaatataacaaataaattgacagacttaagtagaaatgatgatgatgactctactgaaattgatgaatctaatctaagtattaattacaacagattcaaattcctcaataaacctttcatttatgacaccaaactctataaattttacagtcaccattatcagtaaggagtttttcaactccattagctgacatacgtgaaaagaacaaactgaaaatgtctgttcagcttaaactaaatcaattatcaaaggatgaatgtaataatgagtctaagaggcaaatacagagagagatactcgaattaaggacggaagttgaagttatgaaaaaaagttaaaaaatatagagattctaaagaatctgaaaaaatggatcagttgatagaaaaatggaggaatattgcacaaatggcatcaaattatatgcttaatgaagcgagatataaagttgaaagaatgggtggattgagtgaattcaggaataaacagaaaaaggcaaagttacgtaaaatgaagtttgaatttgatgaaagtttactttatagaatagaggaatatatggaatctgaagagtataaaaacttggataaatatgaaaaagaggaaattatatcaagaaagaatgagctggaaaaaatgagtgaaatgatagaaaatggaagataccctggtgctaatgatgatgatgataataatgataatgatggtgacgatgacaaagaaactgatgaagagtttactatggaagatctatataaacaactaaaattagattatgatttagtttataaatccaagtaaggtacatacttctataattgaattgtatttataattaaatttttttgctaaatatacttatcatatttgaaattttctaattaattctataaacattatacttaaaagacatcaccgagttttaaacgtggtgcaatattcattgaaatcaattcttggaataacaatttagccgcatatggaattgtcatctttataattgtttcactagttttacaagttggacaccaaccattatatcccattaaaccacatgaattacaaacatcaacatcaaatgcatctgaacttaacattaatctttcaagtaataattgtgatgcaccatatgcaataacacaatctctctccatttctcccaatctcaaaccaccatctcttgatctaccttcagttggttgtcttgttaaaacagctctcggacctctagctctggcatgcatcttatctaaaaccatatgctttaatttttgataataaattggtccaaagaaaatataagcttgtaaacattcacctgtaataccactataaagcatatctttaccactataattgaatcccttatcaactaaaatttttgacatatcctctaattttgaaccaccaaaacatgtaccatattgtaatgagccgtctaagacacctgccttacctgaaactaattccaacattttaccaacagtcatacgagatgggaaaccatgaggattcataataatatcaggacatacaccttgatcattaaatggcatatcttcttgttgaacaataataccacaaacacccttttgaccatgtcttgatgagaatttatcacctaattcaggacgacgtgtttgtcttaataaaactttgattaacgcttgatcattatcactaactgacatcataacttgatcaatataacttgcctctggagctcgataaaccattggttgatctctatgtgtttgttgcggttgttgctgttgttgttgtggattatcatttaaaacactttcagatgcattagttggaacacatttattaacataaatttgtccactttgaactctcataccaacttcaccaagaccatctggtcctaatgcagtatgttgccaaattggttcaccatcatcattaactctcatacctgctaatatatcctttgaatgatttggatatctctttaaaattgcagtatttttacggaaaacttgacatctaccaaaacctctatcaattgaagatttattcagaacgagggcatcttcaatatcataacctgaatatgacataactgcaacagttgcattttgacctgcaggtaatttatcatattgaatcaattcaattgttttagatttaaccatgggttgttgtggataacacattaaatataataaagtatcaattcttctgaattgattataagcaattgcaccaattgcttgcttacccatggcacattgataagtatttcttggagattgattatgatgagggtaaggaattaaacctgcaactgcacctaaaactgtaaaaacttcaatttctaaatgagttgttgcattaattatatctttttcatataatgcaataagagaatcattttcttcattaacatctaaatattcaactaaaccattaactaagaaatcatcaaattgccattctccatttttcaattttcttagatgatcttctttgacttttggtataccattctcaacaataattaatggtctacaaattctaccaccatcagcagcaatatgaactgaactttgatgaacattagtataaattgaaacaaatgctgaaactttacccgttcgtcttaaatatctaaaagttgtaacaaatttatttggaaatcttgtagttgcaattaatgtaccattcagataaacaccaaatgtaccatgagtatgtaaagttgaactgtcagcaatactgatattttctgcacctaaaatataacataattttctaattggggtttcttcatcatcagttgtaatatgtgtcattaaggctaaatttttaactaaaccacacgcttcaccttcaggagtatctgaagtacacaacataccaaattgtgaaggttgtaaagctcttggacctgacacttttctagatttttcgaattgtgatgaaattcttgtcatcatacctaatgctgaaatatatgataatctacttaaaacatgtgtaacacctgccctttccatcttgaatctcttcaaagaccaattacctgttgaaatggctctatttaaaccagttgtgatattattagaatgaatattaatatgtaataaagcgtcaaattcagaagctctacttggttttttcaaaatcttatcaagattcatcttgaagtcattattaaatttcttgaataaatcttcaaataatagagacattaattgaccggctaattccaaacgtttgttaccaacataatctctatcatcaactaattttgaattatgcattgtcataacaactcttctagtcataattgcaatatataatgccttttcacggaagtctaaattttcaactgataaatgtgcaataagagttgatgcaattgcttcaataccttcttgaataattgttaattttggagcatttaatcttctaatagttttaacttttctaccgatatattctaaagcttctctttgagtatagacacctaatttagcagtttcttcaaaattaacagcaaaaatatcttgataaacagaatcatcaccacaaactaattgtaaaacttctaaatcggagacaataccagcagctttcaatacaataacaattggaatttcctcactaatagaattatgttttagataaattttatcatttttagtaacgacatatgttttagattttctttcgtgtgtagaagatgtaactgatgcttgaactataccctttttatcatcagattcaacaataattctatttttacttaattgttcttgaactaagatgactttttcagtaccattaacaatgaaatatccaccaggatcaagtggacattcatttaaatatgccatttcattttcagttctaccattaaggacacatttatttgatcttaacataattggcattcttccaatttctaaatctctatgaataataatttttctacctcttgtatattcaacatcaacataaattggtgcactataagtcatatctcttagcctacattcatgaggtggatataaaacttcaatttgctttggatcagctttacttttataaccaattctaatatctaaatatttcaaataaaaatcaggatcaacatcacttaaaactttttcatttgcttgtataattttctttaaatccacatcaacaaaataattataagagtctaaatgttgtttaactaaacctttaacctttaaaaaggctggtaaaagattccatttatcttctgctgtattaattggatcagtgagagattttcccttataaacagggttgagaagttcatcaaatgactcttccctttctcttttcacaccggacattgtctaattgagtgttttcttagtctggagatacaaatataaatgaaaaactggagaattcaaactataaatcccaaatcaacagttccaaaacctaaatcaaaaccaataaattgtgatattaatcatcaaaaaaattcatgttgatttttagcagtgtgaaaaaaataaaatttttttttactaagagaagctaagagaggttcttttcgcaattttcactctgatttcggaattttcagaggtttcttttctgacatgaacaatttcaacttagagtgtctgaactttaatgatgatggtgatcgatctggtttctttgatataatcgtaagtatattgattgagatcatcatatactaacagcaacaccttgacacatagacaatggcatctgcacaaccacctgggagtagttcctctatgaataatgaagatacttcaattgatttctttaaatcaacaattaatgaatatttggataatttacctgaaagtgtgcataatcaattatttcatgctagagaaacatgtttagcaattttcagattattaccagcattatctaaattctatataatgacattattattccatgaaacaagtgtaccatattcagatttaaatcgatggataaaattaaataaaatgaattcaaagcaatcaatacaacaaaaccctactaaaatttatcaaaatgattcaataaaaagattaaaatcattacatatcttaaaagaaattaaaaagcaaatgattcatccaataacaaagcaaccgacaattattatatttgttcaattaaatgaaattttcagacaatcttttagggatgtgcttacaggttttggtgatgatggtttaaaggatgctagtcaattaactataaatactgaaaataataatgaagatgttaaaccaagttcaaatggtggtttagatactatatttgctgatgatgcagataataagataacaattgaatatttagataaatattgtctttccaaatgggagaatatattacattttatggttggtacagaaataaaggaaattccatcagttggcgtcttaacattattaagatttgcaggattaatggaattaccatcagataaggaacgaagggatttgatgaatagtgtaatggatgatcatgatattgatactgaatataatgaaggtaaaactgaaaaactatcaattacaactttaagacaactgttaattacacaaaatgggtttcaatttttattacaagatattagttcacaaatttggactttacttattcaatatttaattatggctgagaaattacaaatgaatcccgttgatgttcttaattttattttcttattaggaagtttagaattaggtcaaggttataatattaatatgctttcaaaaactcaattaattatgttggatgatttacaagattatggtttaatttatcatgaaaagggtaataaaagtttttatccaactagattagcaacatcattaacatctgaaagttcaagttttaaaaatgcatcaacagcaattgatcaagaaatttctcaacctagaaatgataaaagtacaaatgttggatcaattatcattgaaacaaatttcaaaatttactgttatacatcatcaccattgcaaattgcaattttaaatctatttgtaaatttaagagcacgttttgcaaatttagttacaggtgttgttactagagattcaattagaactgcattacgtagtggtattacagcacaacaaattattaattatttagagacacatgcacatacaggtatgattgaaatggcagaagctgaatataataaaaattatgaatttcaaaattctattggtaatacggttgcactggaacaattgaaattagaaattttaccaccaacagttgttgatcaaattaaattatggcaattagaattagatagagttgaatcagtcagaggttatttatataaagattttagtaatgattttgaatttgaaaaattattatcatatggtgaagaaattggtgttatagtttggaaagataaaagtaaacgtaaatttttcgttagtcaagaaggtaatggacaattaattgaatatgcaaataaaattatacgtaattcaaatacacctagacctgcaactccaatgtagtatatactttgtttaaattctttttttttttaattagttacttaaatacacaaaaattaactatgttttatacaccttatttagtatcgactgcatcttcttcaacttcagtatctgtatcgatatcagtccatgatacgatatcgtcattatcttcatcatcttcatcatcactactttcatattcattcttgaattcaacacgtttaacagattcaccacgtaattgagccattgcacctgcaattgaagtcttcatcaggatcttcaattccataaacatcaactttagatttttcaattggtttatcttcaacattcataactactggaatatcaatatctgaaccaaaataagttaaatttcttaggataagtctaaaatgatgaacgccaacttcttttggagttggagttgataattgaattttaaatgttgaaatattacattttgattccataaattcatcttgtgttaaatttatatttgaaagatctgctttatttaaaatttttggtgcttcaattattttattatctctttgtgatacaagtaatgcaatccaacctaaattttgttcaatatatgaagtatctgggaaataaggtggaattgaaagtaattcaacattaggttgcaaattaacaactcgcattggatcttttaagttatccattgattgttcctctttaaattgattattaataacatcttccttaaataatttaaaatcgggtttacccttatgagcaggtgatttaattaagaatttcaaactaacatgagctgctgacattggaggtaaatgatcttcacctggaactttaaatttacattcaattggttcaataattggaattttctttgaataattaataattgtatcaactttatctttattaaggaatttttcaggtgtaacagttttattcttcaataatttacctaatgtgaggattgattgatttgtatcaatcttagaaacatcaacaccaggtaattgtaaaatttccttgaaagtaaaatgttttgcgtctttttcgatattaagagcttgaataattgatctatgagcatcaacaattttcaaacaataatcagtatttttgaaagcagcagcaatttcaaggaatgaagataatagtttaggtgtaattgcaacaacattaagacgtaaattttcatctttacaagtttctctattaatataagaaattattaaactgtaaactgtatcaggagttaaagcagtattaatatttaaatattcaacagaatgtgatacttgcttaattatatcatcaactaataaaacatgagttggacttgcattaattaataatttcataaaatgatcagcagttgtaacatgagtaccatttttggttgttgatttaacaccattccaccaattactaactaataaaggtaaaacaattgcaatgaaggcaatatatataacgacaaggaaaggagagaatgcaccttcaattaagaaatgaggtaatgcaataccatgtttaatttcaactggaccatcaggattaccatattttaagaaattttcacgaactgtttcatcagttaaagctttataagctttattaattaaaacataagcagcatcaacagaatcaatttcttcttgagtcattgaggaagtatcaactttatcaggatgatatttaagtgataattttctataagcagttttaattatcttttcggttgcattttcagagatttctaatattttccaaggatcgaaatgattttctgataaaattgtttcagtatttgaaattatatatagaagaccagaaattaaaatccaaccaaaaatagttaataaagttttcaaattaaataattttgaacgattttgtgaatttctaaaagattgtaaataatttgcattatatggagagaatgatgatttatgagatttatttgattttttaaataatgaagatataattgaaattgttgaaggaattaaaggtactaaaattgcagttaatgcaaaataaggccaagtttctgaattctcatcatattcgtaacgagattgtgacattttgtccttagcttttaaataaagagattgttgttcacaagatggaaaaagttgaaatttggtgaaatttaaaacttacacgtttcgctttgttaaagttataggatggacatgggtgaatagagagagagttcttttctttgagataatgaaggtagcatttgttagtttgatatcaagggatggtagaccattatacatttataataacggagagagggaagaagatgggaaaggggaaggggaaggggaaggaatagagaattttcttaaatataatttcttatcacatatgtcattagatgtatttgaatcaacctatgcaccaaatacaagtgaaaaacctggacttttatttgttcaagatggtgttttcatttatggatatgagatgtcaattggtgttaaagtagttgttggtataattagggataaaataacattagaggaatggaatgaaaaagatttgacagaattagattatgttaaaaatataattgatggagtttgtaaagaatttgtacgatacagttgtagttcatttagagaaggtccaatagaggaaattaatagtaatatatttgataaaaggataagtaaagttattaatatataaaggtataatatctatataatgattatttaaggacaacatttgcaccacgtaaagaaaggtattgttgatcaacacctgaaggcatatttttaacaatttcataacattctttatttaaataacgaatttgattatgaggtgatttataatttgttggtaaaccagttatatcacaataagttttaagtggtttaattgaaggtggagctgaaattgtaaaataagttgttgttggttgtttattaagtgaatttagacgtcttgtttcttcattaattataagtcttgcacctttatatcttggatttttacgtttatgttgagttttaaatttatatgcagattccatttgatttatatattcctccatcgttgacattgttgatatggatgtattaaaagagtatattaaaagctatatactctagtttactcttattataattgttaaaataggaaataatacgaaaaaaaatattacgtaataatactaaatctattttaaactataaaaggaatgagaggatttatatagcaaaatgcatatttatgcacaattataaacattgataaccaccatcaacgataatattttcaccagtggtataagaggaagcggaattagataaaagatagagaacagtacctgcaaattcatttggatttgccattcttttcattggagtaagtgacatccatctattaaacatttcagtattaccattaataacatttttagttaaaggagttgcaatataaccaggagataatgaattaattctaatattatatttagcccattcaacagctaatgatttaaccatatgaattacaccagcttttgacatattataagcaatttgaggttgaggatcattaacaattgaacctgacattgaagcaatcattacaattgaagcattttcaattttattattaataattggttttgcgaaagcttgtgcaacatataatgaacctaaaagattaactttaattaattcttctgcattaattgaaggataatcttcagcagggaaattttcacaataacctgcagtattaactaaatgaaggggaaaggttccgaaatcagcagttatttttttaaaagtctcttcaacatcagtgaaattaccaatatcacaagtataacattcaacttttaattttgtatttaaagaggcttttcttactaataaagcatccatatttctatccaagagagcaagtggagcaccatattccaataaagtgtgaatgataggttcagcgagagcaccggaagcaccagtgatgacagtaagttcgttagttaattcaaacattgcttagagaatgagaaagaaaagtaatcaaagcaagttcagttggaaataagaatatagcaatggaaagtcgtctccttatataacaaacagcagatgtataaaaagaaaagaaaagaagagataacaaaaagaaaagaaaagatcaaaagaaaagaaaagaaaagagagggaaactccgaaaataatcgttacgtaatggttttctaagtaattagttcatcattaccacgttcattattaatactttacaccatttcttttcttttctcttatggtcttttcttttgacaaatcaactatggatccatacaaaggacaaatagcaccaactgttattgctcttttattcacagtatcctctgcaactgcatttataggtttaaatgaacttgaattaccaccccaattagctaatgggggtcattatcaattcttaacaaatattgcactactgctttcaacaatttattcatttgttaacattttatatcatcaaacatctatacgtggtattaaaccactgaaaattcatatgtcagcaatttgtctttctttaaatgtagttgtttcacttgtttattggtcattgaaattatttataccacatttaattatggctgaaaaggatggtggaatcccattattattggatattcaaattcatatgatacctctattaactgttgcaattgattatttttgtttcatggaaagatggaatgtgccatttttaagagcttatgcaattgtggcttcattgacaactctttattggttttggcttgaatatttaataactgatgatgcaagttatccttatcctttcctcaatgttgaaaaaaatttgcgtataatcatattcataattgtttccttcattgcattctctgctttcgttgttggtaaattattacatccacaatttatacccgaattaaaggaagctgagaagcatgtgaagaacaattgatctgttctatattatatattatataccactccacatgtcatgtacaaaaagacaatttaatgattaaagacatctttctataacaaaaaaattattttataacttggtttccgcgtaaaaaacctaatcgactcttttatcaattttccacggaagggggggaaattttgacccatacttactactacatacttaattttcaatgacaaggtaatgaaaacaaatttcactgcaatacacagtaaacctaaaagtctgtaaacgataaggaaccgattaaatcgtataggcactggagataataattctcaacatgaaaaattaaggtacacgaatttttaatattagattacgtaatcgagtacatctataactattcaaactagtgttaaaatcagctctaattgaaagtactacactctcttatcttttttaaattgagcgttagcagtactatcagaaagaaaaaaaaaattatacaaaatatatcaaatattttttttattagactttcaaaaaaaagttatctctattttaatactttttaccaaaaaaaaaaagcaaaatttgaacaccttaaatcataacactagtttcaaaaaacattttcaaaaagatgggtgtttgagttctaaactatttttaaccagtataagaccatcagtaacactggtgaataaataatagattcattagaaagaaaaaagtttaatgtgaaacttcatcagagcagaatttttaatttcactttagttattaaatgagtgtaaaaataatttataacgttaataaatcatattaaacaactcatctttcctagatacagagacttatatgatactgatttaagcacccaagtattgtagatcttccacggaaattaattgaaattttgtatagagtagtaaactttaaaccttaataactcaatcaattctcgatactttcacaaactaacaccacagttgcttgattcagacaattctctatctatacctgtctaacatgagtctaggtacaggtctaaaaaatttcagagaaaatttgaaaaatcacaatttcgagcattaggaagtattatatcgataagataaccttttatttgttatttcttccggtaattctttcctaatattgaccagacctaattattgattaaacgataacgttttgattaatcgactctctgctgcatattctgtaatcaagctttctaaaaaggggttcttgtggcaacaaccatttagtgtataaaggggtataggagatagagggtgtggaaatatgcagatacgcagattataatcacaaattaaattaaattaaattaaatttgtcacatagcaacctatggatgaaattgggtttgcttgccatctatttattaaatttattgcaaattgattttctaatttgatattaaaatccttatataaccattgataatgcttcaacactttccaactccttaccttttctttccaattttttttttttttgacaatcaactatggatccttataaaggacagctagcaccaactgttattgctcttttattcacaatatccactgcaactacatatataggtatggatgagcttgaattaccacctcatttagctagtggaggtcattatcaattcttaacaagtattgcagtagttttttcaacaatttattcattttttaatattatatatcatcaaacatctttaaatgttattaaaccattgaaaattcatatgtcagcaatttgtctttccttaaatgtagttgtttcacttgtttattggtcattgaaattatttataccacatttaatagctgaaatggatgctagtgtcccacttttggtagatattaaaattcatatgatgcctctattaactgttgcaattgactatttttgctttatggaagtatgggatgtacgattgtggcttcattgacaattctttattggttttggcttgaatatttaataactgatggtgcaagttatccttatccgttccttaatgttgaaaaaaatttacgtataattatattcataattgtttcttttatgggattctctgctttcgttgttggtaaattattacatcctcaatttaaacctgaatcaaaggaaactgaaaaacattaaagaatgattgatctttttatattatacaatactctatgtaccatatttataccacaccatataccataaaaaggatagtatggaaagacatctcctaacaaaaaattattttaagcggcagtactaatttttatcagcattatttttgactatcatgatactttaatattacaatggactttttaacttatatactataccatctttttatcttttatcttttatccttgtcggttctctctatatatgcgcttattatttgctttaacagcattggtatataataccgctgctattcaatatcctttatcattcttatcttcaaataatgatcctgtattatcaattaattcatttatagataacttatctcaagatttatcagattttgaaatttcttccctaaatgataatgatatagcttactataaacaaatagaaccatcaaattggccaatagatttggaaaaatattcaaatgattttgttataagattattcgattggattgatacagaggatgatataccattttatcaatctactttatcattgattaaggaacaacaaaatattaaaatttgggattcttcattagcatctaaatttattgatattcaattaaataaagatgtggctcaatatttattaactgaattatcctctcaatataaatttaattataaattacttataaataacttaccacaaacaatttttgaaacatacccacaatcacaattatcatcattagaggaggaagaaaatgatgactttataactaattcagaattattttttaaaacttatagagatattgattcaatatatgcttggtttgatttattagttaatacctatcctgatattttatcaatcgaatatattggtaatacatttgaaggacgtccaatgaaagctttaaggttatcagttcactcagattcaaaatcaaatgaaattaaaactgttgttattacaggtggtattcatgcaagagaatggattagtgtttcaactacttgttatatacttttccaattattacaagattatgaaaatggtaaagtttcagttataagatatttagaaaatttagatttccttttcttaccactaatgaatcctgatggttatacttatacttggactaatgaacgtttatggaggaaaaataaacaacaaacttttaatccaagatgtcaaggaattgatattgatcattcatttgatttccattttacttcaggtattgaatctccttgttctgatgattatcccggtgaatcagcatttgaagctttagaaagttataattgggataattatttaaatgaaacaaaacattcacatccaatttatgcttatattgatttacattcttatgctcaagaagttttatatccttatgcttattcatgtgatatattaccaagagatgaagaaaacttattagaattagcttatggtttaagtcaatcaattagattaaaatccggtaaatattatcaaatttttaaagcttgtcaagataaaggtgcagatttattaccaagtatgggttcaggttcagctttagattatatgtatcataataaagcatattgggcatttgttttaaaattaagagattctggtactcacggatttttattaccttcaaaatatattactcctgttggtaaagaaatttattcttcaattaaatactttgctgcatttttactatctgataaataaaattaattgtttttttaatctaaataatcatttattatataacttacttttaatcattgacgttaaaatttcataaactacttgagctgcatttgtacttgtaacttctgcattatcaaaacttggtgaaacttcaacaacatcaccaccaactaaatttaatctctctaaacctcttaataaataaatgacttcccttggtaacattccaccaggttcgattgtaccagttccaggagtaaatgcaggatccatacaatcaacatctaaactaataaatgttggcgaatcaccaattttatgataaatgttcgaaattatttcatctaatccttctctaccattaatccaaacatcatcagcggaatatcttgtccatccttgactgttatcatcatcaaaatcttttaaatcattacctgaaattctagtacgtataccaatatggaaattattttcatcatcaattaattcttcattatgtgccatccataacattgaaccatgagtaaattcactttgattagaattccaataacttggatagccttttggtgaccaagtatctaaatgtgcatcaaaatgaataactgatattttaccataaatttgttttaaacttcttaaatgtggtaaagtaattgaatgatcaccacctaatgcaattaattttggtttttcttctccatctctctttctattaattaataattcttcaaatgccattgtcatttgctttaatgcaattgaattatccattggggtaattggtatatcaccacaatctaaaataattgaaccattttgataaggattaatatttgctcttgtattaaaaccacgtaaagaagtttgtctttgtgatgatgatctaatagattttggcccaaatcttgcaccactacgatatgttgttgctgtatcaaatggcacaccaattataccaatatcaaaatttgaatctctatcaagtaaacatttactataattcaaatgtgcaaatgatgtaataccttgaaatggccattcttcaccccaaaggtcatctaatgttggctcattaactaatggtgattgattagctagtgtatttgatattaataatccaattaatcctacaatcttcattacttttacaaagtataatattctatatcatgtcagataacaaattatatataatttccttatcagtaccactaataataactcccttatcagtaaactcccctcacaatcaaaaaaaaattaaaaaatgtcaaccccccggtggtatcacgtgcagggccaacccttttttcccaaaagagcgaaacctccatttcctcatagtaaaaaatcaaattcattgacgcactccccaaaaaaatattcattttttttttcagttggaatttttgaattttctctgctccaattacactctctttgactatagtgtaaaaatattttcattattattagattttttaacttgttagtataatttaattaatttcaaattgctttaatcataatttgaaatcctttttatttaaccaaccaactttttttaacaatgggtagagttatcagaaaccaaagaaagggtgcaggttccatcttcactgctcacaccagattaagaaagggtgcagcaaagttaagaaccttagattatgctgaaagacacggttacattagaggtgtcgttaagcaaattattcatgatccaggtagaggtgctccattagctaaagtctcattcagagatccttacagatttaaattaagagaggaaacttttattgcaaatgaaggtgtctataccggtcaatttatttactgtggtaaatcagcaaaattaaatattggtaatgttttacctttaggttcattaccagaaggtacaattgtctccaatgttgaagaaaaagttggtgatagaggtgctttaggtagaacttctggtaactatgttatcattattggacacaacccagatgaaaataaaaccagagttaagttaccttcaggtgcaaagaaaattatctcttctgatgcaagaggtgttatcggtgtcgttgctggtggtggtagaattgataaaccattattaaaggctggtagagctttccataaatacaaggtcaagagaaattcatggccaaagactagaggtgtcgctatgaacccagttgatcaccctcatggtggtggtaaccatcaacatattggtaaagcttctactatttctagaggtgcagtttctggtcaaaaggctggtttaattgctgcaagaagaaccggtttattgagaggttctaaggataagaacgatgattaaatttagattatttgtatagtgtataacttactttcctctttgtcctttacttgaaaatcaatcgaaaactttgaattaataaaactttcttaataaaattaaagtataattagtaaattcagtttactgttttaaattaaatgaaatttgattaaacattacacaacattagcaaaaactgaaaaaattaaaacaaaacttattctatatatacctacatactttttactccacagatatcaattggaatcaacaattgtactcaatgatgtagatgttaaattattcttttcaataatattaacaatatcagttacatttgcattttccttgtcaatgatattaacattttcatttccattttcattctcattttccttaacattcattttggaatcaacattttcatttacattcttatcttgaaatttattctttttaggaaatggattattcttgtaatactcttcataataatcatcagcttttttattccaatttgatttgtaaaacttttgctttggaataataccatttatatttaatgtattaacattgttatttctgtaattatgttttgatctcatattgaatggctgttgataagtaattggtacataattaggattaactgctaaaaatggttcattgtacttatttgatttaaaatttggttgatttgcaaacataattggtgcttgtggtaatgatccatttacatagactaaaccattcataaagttacctggatactttgcatatttctttttgttgaaagatttccttctatgaatcttctttttttgagtttcaggttttgattcttcttttgcttctttattaatctttccagaattgacaactttttcagttggttcttccgtaatctttctttcaataacttctctaatcttcttaccgttgtcattattttcagttgtgatagaaacaccatcagttttggaagcattagctgcattctttttattattgagctttttatgtttgaaatactttctcttgaaatgaggtttaccttgctttttggatgttacttttgttgtactactttctgttttttccttggtttggacaattggtgattctactttggtattgttgatttcaggagctatagttgaatcaatagtttgagtggtagcaacattgtttataattgaattctcaacattgccttttgaattacattctacattgctggttgattcattaggagtaacatttgttactgttttatctgctgtagttatattattttctgttttggttagggcctataatgtaaataaattgttagtaactgatattttacaaggaggtagctcgtgtgtttttctttttagatcattacataccattgcagtgaattgtttggcaacatttgaaagaatttgagtgattttaatttcagtatctacaattggttgagaagttttaatttcttctacctcatctattggtaatgaattgttaagttcttcggacatgatttactctacagcggtctgttcgatataaaagaaagtaaaccaaaagaaattcagagaaaaaaaacagaattaaaacaaacaatcaaagaaaaacaactgtttagtggcaaagaaacaagaaaaagggatacaaatgcctatttaattaattgttaaaccttgtaaatggaagcaaaactataaaatgtttcctaaaagagtaattaaaaaatatccccgtttgaggataattgagaaaaaaagtaaattttcaggttacttaacattaagagtatatagaaaataaattaatgatggttaacaatataatttatcaagttaacgttacgaaattaaacaaagtttttattagtttatcaagtgaaatacacaagctttaaatatactacttaaatttatttcttttcagcagctttctttgcagctaaagccttttgggtaccgtgtaaagcccatctgtggtttcttctgaactttgcatcaacaccgtttaaagatggatatctgttggtctttggcttcttaataccgttcttgtgagccttcttggtttggttatgtgcagtatggttcttggacttagacattctgtaataataaattaaatttatcaaaatgataaaaaaaatataaatgttagtatttcagttcttatttgaaaataaattaggaataataataataacatagtcgaagtgcattgcaaataaagatgtactgtatggattcttaacttattgacatagactgtgatttgattgaatattatcagcttttgattcaatatgaacgcatattcaacattagtggattttctaaagtattgtatctaattgtcaagcaattctcctgtctatcgttatcaaatatctccctatatggtgtgtttcgtacatacgtttatcgttgtggtttaaaagacaaaaacgaaagtttcattaactaactgcaatttgaacattttagacgtagttaaaatttctcctcgctctctacagtaaggaaattcttttttttttcgcatttactcaaaattttaaaattattagacccagtgagacctctaccaagttttattttatttttatgtgcggtttgaggatggattttgaatattctatagcagtcacaagatcttaatcaagtgaaccaactgcataaatcagttgatatactgatgctacaatagataggtggatattaacattcaattaataggtatgatgtatattagaaaagctagtaagtaacgtaaaaagaaagagagtatataagtgttaaaacaggtttatagaaacagtaatgtagttaaaacaattattttgcagctgcaacagcttgagcagcaattttagcctttttagcaatctttgcttgagccttttgacccataataccaccaccccagtgtctctttgattcatcgaacttttcagtaaagttagcatttatagtagaaactaatttagctaattcagcttcatcttctgccttaacatcaactaaagctgcaactgttgcagttttttgatgaactaaagtacctaatctagccttacctttaacaatagcatatggaacacccatcttttgacataatgctggtaaaaagatgactaattcaattggatcaacatcattagcaattaagactaatttagcttttttgttttcaattaaaccaacaacatgatttaaaccgtatttaacaacgtatggtttttcagaagcttcttctctctttttaccttctgcaatagcagctgcttccttagtaagtctttccttcttttcagaagtagtttctggtctatatttgtttaataatttgaaagttgcagctgcagtgttcttatctaaagtattggagaattgtgcaatagctggaggaacctttaatcttaatgataagattttcttttgtctttgaagtctaacatattcaggccacttaacatatcttgataagtttttctttggttgaattgcttgacctaaaccaaagttctttggtgctgcttcaaataatggatttttggaagcaacggatttggatttcttggtggctaaaggagctggtgcaacttttcttgaagactataataaaattaaaatagttattaaattaataataaaaagattgttagtaacttgctggtttaaaatactctagtaaaagataaaacaaactttatttaaatgaatccaaataaatttcattcttctttgaaaagatcaacatacaatcaaatgaatgaaaagaaaaatcatttaagatatcaattcaaatattcaatcatactcatataaggtcatcgagtacaagtcactaaaactttttgtaatataataacactaatttcatttatccgaaaagaaacagggaagcaaaaactgtaaaaagacatgtatagatataattatgaaattcataattatctaaacaatgtacaaagaattattataggattcttaataagctcatgtaagaccattgtaaagattaaaaatcatcataattacacccacacatgccaatcacagatgaatgctttacctctaatattctttcaaaataaataaaaatgatattatattgcggtaattgccttcaaaagtatggaacaattagtgataatgtaataaaaatttatcaatcaatgaacggtacatgtcttttcagatatcctttagccgaaaattaaaactttttttaatttcaataatttcaatagttgatcattcagtacataccattatgttatgaatatataaagtgatttacttgtcaaaggaaagataaataaatgaaatgtgcaggaataataccaggaagaaagagttatcattaaaagactgaaaaaatttttcacacgtttgacagagtgagtattttgaaaaaatggaaaagtttcaacagcttttcctgtttccatgaaattcgcgctacttcccgattgggtaatctgtcaattttgttatcgcaagtttacatcgatgattgattgcaattaaatgattctttaaggatttgtaagttaaattgtatcctactttgggtatcaattgagtaaagtaggatacaatcatgggatttttgaacagtcatcaacgtacagctgttacatcaattattaatgattgttgtgatcaagcagaaccatcgcaggacgattattatatcgagtctcagttatcttcacttttagatgctataaaaaatcaaagggattttactgaaccgggagcagttgaagctgctagagctttgagaaaacaaatgaaatatggtaataacgttgaacaatacaatgctttgaagattttagattcattagtagtcaatggtgcaacagccaaatttatgcagcctttatttaatgatgataagctattggatagattgcaatattatttaattggtggtaagaatctgaatgataattcattctcgtctagggttccaaatgagagtggcccaaatcaacaattatctgatctaacatattcaatgatgacacaatggtataatgaatttaccgatataaacagtttaaactaatatgtttttattatatgaaagatgttcaaagacgagaagacaacaaaagaaaaaggcctaacaagtcaagatccaataaaaatttctcggaagttcctgatttcatgaatgatgaggcagatatgtctactcccttctcgagttatcaagatgatgatgctaatagaccaagaactaatgctgaattagataagaagttcaaaattccaaaaattaactatgaaaaggaagcacctaaaattctacaattgatagcagaggctaatataatgtcgacaaatttattgaatactgtcaattctttacaaaaggatgaattgtccatacactcaatcaaggcgaatgatgcctttgatcaatgtcgtgcaattagaagaaaagttttgagatatttacaattagttcaaagagaagaactgttaggtcctcttctcaaatgtaatgatgatttggttctctcattaaaaagatatgaagaaaaatctgtgccagttggtactaaaattgataatgatgattccgactccgatactgactctttagcaaattatgaatctgatgatgcatctgttcttccaaggcaaaatgtgaggataaatgattatgatgaggaagattccgattatgatgattatcacaatgatagagttgttcgcaatgaagagccaccaacaactgttgactaccaagtacctaaaaaggcaccacctccagttccaccaaaaagtagtatttttaagagttcaaagtttcaaaaaggttccagttctacttcgaggaatagtaaaaagcaataataacgactatgatccattttcagatgtcaatgaagtggcacctgtatcctggagttgagttaattggggagaatttttattttttgtattcattcattatcagtgttttttcatgttgtagtagtttttatctagatctatatgtaaactatgtatcagtattcagttattagactttaaccttgctctttcattaatgattaatctaattggcgtaactgtaaaaaaagattatgtaatcaacacaattattttttcacttatttacatcaagcttgttaatcgatatatatcgacatgtgcatgttttaacaaaacttctttacatgtgattaatagcatcaggtgaacactgtgaacacatatccatcatgttttctagattaataagaccttcaataataacttctccaagtatatcatataaatcagctataagaaatttatcactaaaacctcgtcttccaaaattaccaaacttaaggttaacaccagatgttccaggtaatatcattggttcagtcaatgatgcatatgttccaccaccaggagatatcagtgttggagcatttcattggttatatgaaaaattagtcgttgttggaatgataccgcttgttgtattcccatttattgcaggtgtagattacccattatttgatgcagctttaggtactttgacattattacattcaaggtatggtttacaatcatgtattattgactatattccattaaggaaatttggtttctggcacaaaatggctatgtttttattaaacataggtactgcagtttcattatatggtatttatgtgatagagactgaatataatggtttatgtgatttaattcataaattatggacagcttaatgaaaatgcttgttagatattagtatgtatataaagatgtaagttcaataaacaaacaaaattgaaataatttacagtaaaaatacagaatgatgacatgatcgggtgatttatgttctatagtaatctaccgtctatagcgttttcttccggtaaaattgtcatctgtaggtagatattctacatcacctggataaacaggtatgtatacatcacatgaattgtaatcatctggatcacgcgttgacatcactgataaagatggaatgggtatgttacgtggtggaatggtataatttcttgataatggactcgggtgatttgatccaaatgtttctttgggtattctttcatcttcaataaattgagagttatctgcgtagctgtattcaggtgaaattgatggtgaattgttagagtttattgagctcggtgtaagagaaatactggaagtcacatcttctatatttgtatctatatcacgccttccactatgttcctgcaatctaagtaggtgaaatgacttttctctactaacttcgtccttcgaaactgcaatataaccagttgacttgttttcatagtttatcatagcatgaacggctttggggaaaacagatcctggattaattcgagatctgtattccttgtaatgtaccctccatattgcatctcgtggagcatcaagttcttgattaatccatgtttcaagtgctcttacgggtatgtaatcaacatatgttgaagcttcggatgattcgaatctgtaaccatttaatctatttcgtatagagaccgcacctggcacatcagatattaaaacatatgaatggcttcgtttaccattaatccaagctctttcaactgtacagttttctctttcagattcctctttcaaaatctctttgaattcattaatgtcaatatcgcagttcagattaccaacaaacaaagctctagttgtttgaaatgatgggtatcttttgtacttatatcgcacagcgttatcacatagatccctatatattactttcttcttcatataaacttgaccgtcctgacctattgttcgtgtcttcagactcatcattatcatttgattgtcggctgttgaattcttcattatagtcgcttgtatttcgacttttagagacactatttgatcttaatatcggtaggcctaaaccctcaggcattggggaaataattggagttcactttgtcttatcaaaagagggctgtttacaatagaaaagcagagattggtgctaaaaacaattatattttctaaaaaaaaacatgatgcagagaatcttagcaaataatagggagaacgatatggttctcgaacgacggcaattcgatgatgcatttgatgaaattttgcaatttttgataatatattgatggatgtattaaattaaaatacattgccctataagaaagactgtatgtacagagatgttgtgtataaagtaaatttatatatagaaaggattggatatccaactgtaattagcttctaaatggaaagataagatctattagcaatagccaatttatgacttaatactctcttatccattaatgaagatttaccacttaaaacatgtaagatttcatcacataatctaactgagaaatcatttgaggctttagaatctgatgacttcaatatccataggagagccattctatttctttgtctttgagttaatggaactggaactgtaaaattcttagcaaaaccagttttaacagttttagtaacaacaattggtgcaactaaatctaatgcttcttttaatttattaacaggattttctctagtttctaagaataataagtaaagtgctctattaagatgctttcttgcagtttccttcttaccatctttcataataatattaaccgcaagttctaaaacttcatctgtttgttttggtaatgctttaccctttaatgcttgtgcagattcaacttgttgtgcatctggttgaaaccctaataatttatccatagattctgaaattttacgtgaaggtgcaataaaagtattagtttttatttcattctcaagttcatcaattatttcaatagttaaatcatatgcttcattcatttttgcaacatcttctggtaatttagattgatcttcattctttaattctgcaagttgatcagcaattgaattgacagaagattcattttgaacagattcaacagcttcttcaatttcttctgctgcttcaatttcttcctttgcttcttggaaaacataatctgataataatttatagttaattgattctttatcacttaaagcatcagcaatagcatttggttcagataaataatcctgtaattgaccatacaacttcatggattcttcttcattttgttcgttatataatttagaaacaatttcagtgaaagttggatcgattctttctattaatttgaaaccatcactttctaaaccattgtgaattaaatattcaacaagtttatctggagtaacagttgattcaataattttccattcagcatctagtgaagatcttaaaattttgtacgattcagaatttatatcgttcatagcaatataaattggggtattgtcgtttgataagtaagcatcaatttcgtcattctttttatctaatgcttcaccttctggtaaagtttcaagttcaaccaataattccccgaattttggatcaacttcttggatcttcttgaataaactactggtaaaataatctggataaaattcgaaaacttcataaagttcagataaatcaattggtaatggttgctctaatactttcttcaaagtgtggaaattttcagagcttgtatcttcaaaagattgaaaaattttagattctctattagaacagtaatctaagatttcttgatatttagcattgagttcttctccatttgatgggtcaataacttcatatgatttaagtaatgttgcaaattcgttatcaatagtttcaattagtttcaacagtggagagttgttaatgttttcataattgtttaagttagagaagatagtttctaagacagattggccatcgattggacctgattcagttgcttctaaagtttcagttgaagattctgattctgataataaactctttaattcatcatattgtttatttgagattctggaaattggaccattttggaaatcacttactaaagtatcaactaattcttgagttgggttagttctaattaaattactgaatgaagttgcaaatttaggatcaattttgtaaacgtatttgaaagcttcggattcactaattgtatcagctagtggtaataaagagtttaacatttcactaataatacctgaaacacctgttgatggaagtgttgataacatcttggtaaatgagttaactttatttataattgcatcatgttcagactgaatttttaattctttttctccaactttagcattgaatttttcaactaattcttcgaatggaacattgtttgattctgctaatgcctttaatctttcttcaatggaagcttccttttcttgattaactttcttaaaatgagctgctaaagctgaattttcaaaatctgcttcagttggttgttcatgaatgaacataccatcttcatttattttatttgatgaaacgaattgagaataaacatcataaaatggttttgaagctttttttcctcttttagattttttcacagtttcgtcttgagtactggaagagttaaatctttgacttaaaataactttacatgatcttaccacagatgtgttggttttgactgtggatctgaatgccgcagatgcagatcttgaaagcatggttgtgattggttttaggaaatatttgagatataatatcaccctacaatagtatttattgtatacttaagccttaactttaacatttttcatgttgattttctatgaggtctctcgagaagtgaaatttcaaaaaaaaattacaaaaattagtgaatggtgcacggtttccttttcctttttcggaaatcttatgatagcaagagctttaaaatattgcaatttagggattcattataagagatcaaagattaaaatttgttacaaaaaaagtgtatttattacctataattaaaagaaaaatataaaaaatcaaacttcaacaacattaacatcatgaagctttttctcaatattctgtgaagatgtacctacaaattcacttaaaatacgaataccattaacatcagttgaatcattatctgattctggatgaccatttagtttcttttgaattgcagtgagattaaattgtggatacatttgatcaacatacgtaccatcgacttctgccatttcatagaaatcggcacctaccatttctaattcttcattagctttaatttgtaaacctggaattttatcaacaataaaacaaatgatataagtagcaactaatgaccagaagaaacttgttgtccaacctgcaaattgataacccatttgtttccaatgatggaaaatccaaccaccttcaatttcagtcactccatcagtaccagctatataaggagaagcaaaaacacctaaacaaattgaacctaaaatcccaccaaacccgtgaataataaaagatctagtagtatcatcaacatgtgcaacttcattaaatctataagctaatctacaacaaataccaacaaaaacagatgtaatcaatgcccaataaggagagtaaaaaccacaagatggagtgatattaactaaacctgcaactgcaccttcacaagcagcgactaatgaccatttacgagtaaatgcataatcaacaccaacaaaagcaagcattgcggaagaagctgcaatttgtgtatttgccataatataaccagttctagtactaacagataataaagtacctgaattaaaacacaaccaagagaaccaaatcaatgaaacaccaataaatgtaataacggtattagcaggttcatactctgctttagttttcggatcaatccaatgtttacgaggaccaacgaaaaatgaataagctaatgaagcaccacctgaagcaatatgaactggtccaccacctgcaaaatccaatgcacctaattgataaaggaatccattaccacaccaagttgaataagcaagtggacaataaacgacggtacaccaaataagaccaactattattgaaggtaaaactcttgaacgttcagcaattgaaccaacaaaaatttgaactgttgcaattgggaaaaatgcagagaatgtaaaataaataattgaaggaattgtaccaccttcaatataaggaccaacaccaatattttgtaatgcaccccaagcaaaatttcccataaaacgagaatttgaaggtgaaacagcaagtgaataaccaaataaaaaccaaagaactgtaactgatgcagttactacataactttgaaataatatttgaataatatttttacgtttcaaagtaccaccataaaacataccaatggcaggtgttaaaatcataacaccaacagtacaaaacatgacataacccatatcagccggtgaaaaagttgattgatcttcactcattggtacatctctgtataataattgagccgatccaagacctgaatttgcgtaacccatgtttgatttgtgaaaaaaattaagatcttaaggaaattgaatagatatcaaataaagtttaaaaaagataccggggaatcaagttatctaaataaatatttgaaggaccctgagataattgagaacacccccgatcttttataagatcaatataaaataaagctaagttagagatatattagattgcattgataagagaaaaaaaaatcagccaatgcgataactccaatgaaaaaaaaaactcgatggacatgtgttcctaaatgggtaaaaataagagtgataagatattttatcattattaatgtttaaaatgatggtatatttatattaattacagtatacataaagaatgaatgactatgtatttgtgggagttgtctgacgacgtatatcagcaaccgtttgagttaattcagggaattcctgtattagagaagcagcaagaattgattgaaaattttggaaggctaaaccacgaccatgtaaatgttgattaactttacgtacaacttcaacaaattcacgtgtataaacatccggattacgaccatcttgaacataatgtaataaagtctgctggtattaatacatcagcattttcagttgaatttgctaactgttgcaagttgatttaatgttttatttatattatttgacaacccacgtttagcatctggcgttccctgaaaatcatgtacttgaacacctagatgtagcagtgtctctattagattatgtatttgttctgtagttgtagacatgtgttgtatgaagttgattggttgattagtatagtctttgatcgatctgtgtaatttgttatatggtaagagtttcgccttaaagcagttaaattttttttttcagtaagtggaccgagttactctaatagtgtaaattagcgggtatattatgataatgatagtgatggatacactacactgcggagtcactctagaatagattagaatggattagattagatcagaagataagagataacttaaagataagactgatcaacgttataacgttcctttctttctttaacattctttcttaaacattcttcctttctgatatagtaatagaagggtgtataactcaacataatattacgtaattctgaaaatatatattcacgtgactctgcgcaaattttaatacataataattgcctaatacggacaacagtctaatcccgtcaattattatctaagcattaaaattttgtaatgactgttacaatactactatagctgaccagtggattagtaaagattaataatatgatcttcatgtatataatgtgttcatgtccttattatgatgaaattatttaacagttagcaaaaatcaacgatgttacaaattgatgaatgaacttatagagcattggaataatacattagccgatgcaaaggcagaagagattatattatgggcatatcaaacattcccaggattaattcaaacaacagcatttggattaacaggtttatgtattatttcaattttgaatcaacttaataaagatgtaccattagtatttattgatacattatatcatttcccacaaacatatgatttagttaaagaagtcgaagataaatataatattgatgtaattgtttataaacctaaagatgttgaaactgagagtgaatttgttaaattatatggtgattcattgtgggaaactgatcagttaaaatatgattatttagttaaagttgaaccattaaagagaatttataaagaattaaatgttaaagcagttttcactggtagaaggtcaactcaaggtgattcaaggtctaatttaccgattattgaaattgataaagtatcaaatgttattaaaattaatccattatcaagttggacatttgatgatgttaaaaaatatattgatgaaaataatattccacgtaattcattacttgatcttggatataaatctgttggtgattggcattcaacagtaccagttgcagatggagaggatgagagaagtggacgttggaagggacaagttaaaagtgaatgtggtatccatgtattgcatgaatacgatcattttgaagagaaatgtgatgaaaatgaaaatgaaaattccgagacaaaataaaggaatatagtgaaatatagtgaatgaaatttccgaggtgcttacgtaaaggaagttatttataaaaaactttataatatagaaagactattataaacaattcgtactgttaataatattaatattaataacattaataatttgatcatttgccctcgtgagatcgttatatattatattctttgagttaatctattaattatatattacaagacaaagaatggcaggcattgcagatatcagaaagaagctggtcattgttggggatggtgcttgtgggaagacttgtttacttatagttttctcaaagggggcattccctgaactgtacgttccaacagttttcgaaaattatgtcgcagatgttgaagttgatggtagaagagttgaattagctctttgggatactgcaggtcaagaagattatgatagattaagacctttatcatatcctgattcaaatgttatcttaatttgtttctcagttgattctcctgatacacttgataatgttcaagaaaaatggatttctgaagttttacatttttgtcaaggtgttccaattattttagttggttgtaaaattgatttaagaaatgatcaagcaactatttcaagattagctgaattaggtcaacaacctgtttcaacttctgaaggtcaagaagttgctgataaaattagagctttaacttatatggaatgttctgcaaaacataatcaaggtgttagagaagtctttgaagctgcaactcgtgctgctttagcaacaaaggaaaaggaaagtaaaaagaagaaatgtacaattctttgattctttctataatctttactgtataatctaataatatctctcaattatcaattattaattattaattattaattattaaatatctattctatcacccttatatatcattataataaataatatataaatttatataatataactactacttcatctataatattaaacttatagttattaactatataatacgcttagattctcgaaataatggatacataatcaaattttaatttaacaactttttaaatcaaatttttactacttgcatcaatctatttccccccttctcttcaaataacaatgccaaatactattgacgacgctccaactcctcaaaatactcctgcatcagcggcaggctcttatatgccatctcataatgtaccaacttcactttcaactattgatgaaaaaaatgaattattacaatcattattatcaaataatcctcaattattacaatcaattcaagataaattaggtactttaattggtaaagattcaggttatttccattcattatcaaaatcaaccaaagaacatatttatgctttaaaaactttacaattatcacaatttaaaattgaagcagaatttcaatctgaattacttgaacttgaaaaaaaattccaattaaaatatcaaccaatatataaaaaaagatcagatatcattaaaggtgttgagaaattagattcaaaagatattgaagaaggtaaaaatcttattgatgaagaaggaattgatgaggaagatgaagaaggtgaagatgaagaagaagaaaaaccagaagataatgctgaagaagatgatcaacctggtgttccatcattttggttaactgctatgcaaaatcttcctcctattgctgatatgattacagaaagagatattgaagtattggaatcattagttgatattagaatggaatatatggacattccaggttttaaattaattttccaatttgaagaaaatgaatttttcacaaataaagaaataactaaaacatattattatcaaaaacaattaggttacacaggtgaatttatttatgatcatgcagaaggtgataaaattaactggaaaagtaattcaaaaaatgtaactgttgaaattgaattaagaaaacaaagaaataaacatacaaaacaagttagaacaattgaaaagacaagtccaattatttcatttttaattttttcacacctccttcaatgcctgaaattgatggtgatgaagatgaagaatttcaagatatagatgaagaattagaagctgaattacaaaatgattattcaattggtgaattaattaaagaaaaattaattccaagagctgttgattggtttactggtcatgcattacaatatgaacctgaattccaacctgaagatggtgaatatgatgatgaagatgaagatgattatgaagaaggtgatgaagatgatgaggatgatgatgaagatgatgatgaagatgatgaaggtgatggaaatccagctgaaaagccagaatgtaaacaacaataaattaattaaccttatataatataattattgttattataattattattataaaatcttatatagttaaatcataatcgaaaaatgagtatatactcttaaccttacatgcattatcatcattaaatgaaataacgctacatttagtaattgtatcgttaattgtatcaaaaaaaacacgtaacttcttctcttttgatatccaactagatagtttaactgatgattttgatttaattataatatttatacttgttttacccttccttaagtttttctcccatatgagaacattatcagcatgtgtcaccataccgttatcacattttaaaatttcagtatcatttggaacatccatctctatattaaattgatttatatctatgttactatttatcaataatgtaatctcaaatttatcatttgataattgtttatatttaccatcgatatgtacaggtaaatttctataacttgaattggatttataatttaaaactgattcaatatcgttttctgaaacatatagtattttcaatgtatctctagttttggatctgattgtacaatttgaagataatctcaataattctaaagtattagtatcttgaggtatttggaattcaaaatcaattgagttattaggtttgcttagtaataactaattcaccaacaatatctacttgtgaataatcattatgtttcttcaatttgacaaattcattaattcgtaattcatgattttcagtgattgtttcaggtttgttgattatattcaaatgatatgattccttagttatattaaagtcatttgagattttatcctcctcggagacatctttgacgggaaataattctaaaagcatatcaattgactctgtaccaatgtttcgtacataaccttgatcaattaattggtttaaaaggccatatattagtaagaaattattctttatatcaacgtctttcaaatgatattcttccttgccagtaacattagtgttcaacaaatgatttatcaatttagtgagatttaataaaaattgtaaaataacacttgaatcagcattatgtctacttataacaacataatagagattaccttctctgatatgtataaatgtggttgatccaatggttaaaaatggatttttgaggaaaacgttcatttttgatgattttatcataaaatatgctacttatttcattcttaacatcctccctgtatattttagatattaaaacatccccggtagagtttagtattagtactgctgatatcattgcttatagacaacagcatcgtatggaagttatcggattaatataattatggagctttaatttctcaattataaaatttctaattttcggtgattcactgtgaaccatttaatcatgacattattttcttttcaatcttttaggaataaacgtacaactatagaacactattatggcaagaggtaatcaaagagatttagctagacaaaagaatttaaagaaacaacaagagaaggctaaaagtgaaaagaaaggagattatcataagagaatgcaaaatgatggtgatatattgagagagaagcaaagacttggcagatgaaagaaaagcagctgaagcagctgcaaaattaaagaaatgaatgtagacttatagacatatactttatatactatatggatatatacatgtatagacactcccgcatattttatagattacacatgtgtatattaatacagtatctaaattatattaattacaagagaaaacccgatatattttttatactatattaattataaaccaattgttagactatttaactaagcatcaactttaagagcatcaggattttcattattttgatgttgtaaagcttcagcagttttttcaacttcatattggaaatccaaataagattttggtaaatgatgtaatctcataaaaccatcttcaccaccagacacaaaagaatgaccatcgggatgagttgataaacaatttataggaccaaaatgtcccttaattctaccaatttgatcttcaaatattttatggaaaattttacaatcgaatctaccttcaccaccggcagttgttgtaacatttttagcatcttgaccaccacctaacaggacaaaatctttcacaggtgtaatacaagctgaattaacaggtgcatcagagagatattctttcaataattcaaaagtatcaatatcatatagtcttgaagtttgatctttagatgaagcaacaaaataagttttatcagatgatgtttgaatatcagtaacagtttctttgaaagccttaactctattaagttcttcaccagttgttgcatcatatttagtaatactaccatcagcatgaccagttataatatatttaccaccataagaccaagctgcaacggttggttttatagatgcatcacctttatttaaaatttctaatacaggttcatcagattgttttgaaagatcagatgtattaagttggaaaattttaacggtacctacttgacccatagcttgatctgttaagaagaataaaaatttattatcaggagataattcacatctctttgcaggtgaattaaaattccatgtatataaaattttaccattttcagcattccataatatacctgaaaaatcagcacttgcagtaactacaatattctgtttccaaacttacatcaaccgaccaaacagtacctttatgaccatcataggtacctaatctttcaccatttgatgaataccaaacacaaacgtgttgatcctttgcaactgaaaagattaaatcaccttctctattatatttaacttgtgtaagaggacgttcatgacctgttaaaagaataggtctcattgacttattagaggacatgttgtttgagttattaaggtggtatttataataaaattattcaccactatgttaaaatcaatcaatgatatacactttttcatgtagattattcatgaagaaaattatttcaataatatactataagtgaaaaaaaaatttattattattatggtgtacgggagaaaaaataagttggtgttgggtcgatgggacggtgagttgccctgttttcaattttcataatttttagtgacattgccattattgttaaggctctggtaggtgtagaactgtattttatattgctcaattgacgtgtattaagcatttctttggttggaaatgacagaaaaactacctggtaactactgggattctcaaaataatgatgaaatgagttttctaggctttaatccattggcagatgcaaatattcatatagatgatacaaataatagcaataataataataacaataacaatagaaatttatatgatcaaaatcaacagaagcaattgcaaatgcaacaacttcaggctcaacaacaacagcaacaacaacaacagcaacaacaagcctacaattcacgtaaaagttctcatgcttcgcaacattcacaaacacagtctcaagttggaacacctaatatgcttaatgcaaataataacaattataataacaatactgctaattttcaacaacaacaacaacaagttcctcaacaagcacctcaacaatcttcaaatggtatgcatatgaatcatcagagtacagagaaatttttagatttagtatctcagtatatggaaaaaatgaagaaaccatttgttagatatccaactgttcaaggtacaaaaattaaccttttcatcctttattatatggttacatgtgcaggtggatttataaaagcatttcaagaacaaaaaattataatgattgcaaatcaattaggaataccttcaaataaccagaaagttttcaatgaatttttacaatgttattatactaatttattaccatttgaacaatatgctagaactgctgatcaaatgaaagattctcagagaagagctgctcaacaacaacaagcaccatctcaatcatcaaatcaatctcaacctcaacctcaacctcaaccaagaaataattctcaaacagaagctcaattacaagctcaaactcaggcaatgtctcaagcacaagctcaagctaaaattcaggcacaaatacaggcacgtgctcaagctcaagttcaggcacaagctcaggcacaagctcaggcacaagcacatgcacaacaacaacagcaacaacagcagcaacaattagatccaagatctcaagccttttctagagaacaaattcaagcacagcaattacaagtgcaaatcaaaatgcaagaggctcagaaaaaagctttgaaacaacgtcaagggcagcaacaacagcaacaacaacagttacaacaattacaaatgcaaatgcaaaaaaaggaacaagctgataatattcctaatccactttcaacaataaagcaagaaactgatattaacaaaccaaattttattgttgatccatcaaaagatcttttaaaaaataacttgaaggctgctttcaatgaacctttacaagatcaatcaatgcctgatgttatcaaaaattatgttccgtatacagttatacaagacaaacctgcgggtatagatatcatgaatatagaaagattgggagaacaattagatgatatgaaacccgtttttctctattttccggaattaggtaaagtgaatataatggcattggctttatctttatcctctagtatagttgcagaaataaatgtggcattgaatgttttattaattataagttctgatcctaatgttaaaatattattcgaaacttgtccaatattacttgacagtttagctaaattaggtaaaacaattcttgaaaaattgatttcaggggattgtcattttgatcaaaataaaaactatgttttaactaaacaacaaattaaagaaaatgcttgtgttagtaaaatagataaaatctttgaaaaatattccaaaaaatttggtggttcagactatgaaattcaagttgattcatttactacagaggaaatttcttcacctaataatgaaaaagtgaatataaatcttgaacttaatgattataaagacaataccaagttaaagaatttacatattaatgaaagtcctgatttggacaacttcttcaaattttcccctgagtacaaaatacctaattatttggatattttgcatgaatgtcgtcgccaagctgatgatattaatatgaatgtttacgaaaaaagttatttgaataaacacgttgttttggttgaagaattaagtacaataactttaatatttagaaacttttcattctccggtcaaaataatttgtctatggcaagaaatagaaattatctagattttagttatgcattaattgattcactcatatcaaagaaggatatctttctatttgaaaggaaaagattagccttgatgaaagatacactaatgatattctccaatataatacatgctgttgatgttgaagatgatatggaaatgtggttaatatttagtcttgcttattcatttaatggtagtggtgatgctgcagaaaaagagaagttaaacattataacatccaaatctgatctttttgtgaacaggtatcacacccatgcaattgatgtgctatccaaaataatttctagctcttcattgaacaggcaacatttgaataacattatcattggtaagacagatgatgagttattgaagataattaaattgaattttggtgataactttgcccatgatggaaggttattcaaagagattttctcgatgtttatttccgtactaccagttacatcaatgtatcaaggtgttgaaccattcaacgtgatgtatcactcatgtatagaggcattaacaagttgtttgcttctgacagaaattttagaggacccttcaagatttacgaaaaatattgcacttgagttagttgtttcagaagacagaatcgtccctatattacaacatttagcatttatatatgctgctatatacgccaatatcagggatggctctaaggaaaaatactcgctgttttcaatgcgttgcgtggaacttgccaataaattaatcaattgctcaattgaccattcgttgaacaatgaagataagaaggatttagagatatctatgttgaaaggtattactagacttttcggcaatccagacaatgagattggcttattaatgacactaaatatacctacagaaattttggaacatgttatagaaaccatgaacattgaaaatagattgaatcaactttaatctattaaataaaatttataattgtacaataccctaaattactatatagaaaaaaaacctattctttacaacttttattaatgaaagtaaaggctttacgtgcattctcctttcctataatttcactcatatcatccactgacatttgacaaaaatcgtatagtgaattgaccttattgataatcaatatactatttgcatcagtaataccaggtatcagtttcaataatttgattgcatcttcgtttgtatctctaccatctttaataccattagtcccagcagtcaatgcaaattcaacatcatggatctttttgattggctttaatctctttaaatattttcgcagtttcaaatggtgaactactccagattattgaaagtttaggaaatgatttcatcaatgctgcaagtcttaattgtaattgttccaaatcattactcttaacatatttattagaattacttgttaaaaaacctgttgtaaaaggttcaaatgaaaaggatttaccctcatcaaattcaattaataaaactggttttgaataccatttaaacatactctcacattgtttattcaatctaccattttctaaagattcaattaaatcacgtactgcttttctttcaacacaaatttcatctgataaaatgtaatcaccaactgttaacattgcaggtataacttctaatcctgctaagtgacaaacaaatggtaattgtgaattgaaatctctcatatcaacaatgatttatttgtttccgtagcaataagtccaccacctgcaattcttgttttcgaattcaaatgtctgaaactttcattgaatttgctttgttcatcatcttcggtactgaaaaacttaggcatgtttgccttttcacggattaaactagtaaatgaatctttttcatgtttaattgaattcaaataaatctgttcctcaacagattctccataatacatgaaaaaacatttggcagggtgtaatgatgcctgatataattcaatcattctaacaaatacaagacttggttcataacaaataatataagatggcataagttcttctaaattgatgctatcaaatgttgaaataatcacttcattgtttctatcaatacaatcgtacttgatatcattggttaaactgttgtaatattcatattgaatttcaggagtttgagttcgttcattcgtttgatttatttcagcttctaaattattaagttcataatctgaatcatcactttgactggattctatatcaattatttcattctcattaataatttcgtcgttttcttcagatcccatattcataagtctattgtgtttggacatcacgctaccacctctatttcttctacgattagaatctctaaatttatttcttgtgaaagttttagaaatgacaacatcgtcctcttttgttgcatcttctctctgtgattttacatttttcaattcagtattcattttccttatcaataaagatgattcttttttccagttttgatatttcagttcctttttcatcatcttacggaagctatatgattttgaattaccttcatttaccactttatggtttgataggaccctttctatttgatgacaaattgttcttgatgcacatgcaattaaaatagggccactctcagaatcatttttagcagttttttcttcatttatttcttctaatattagcatcagttgctcccatttcggtggctcttcaagtaataaatcatcaattggtgaaattgaaggtttattcatatttttaaattttctgtaaacacgatctttactacaagcaattgttgctgaagcttctggaatcattaaccataatgactctttatttgacattgacattgtatgttccgtgacaaaactatttatattttgataaaatgaaacagaatcgagtctaaataaatcaatcaaaaatgtcttcaaaattgttatttcattaacaatctttttagtggtaacagagattctatgccatacgggatttaaagcacccataattgattgtacaaaattagcatctaatgcattttcaatagaccaatattcagaagctatatctggattatttctcttcaattccccaatcagtagctcaatactagccataagggagttttggattttgaccatataatctgtcattttaattctcacttctgtaaccttattgatgggcgtggagaaatctgatttaatggtcttcttcattttcctcttgaattgattctgtaactgcaatatggaatcttggccataaaaatgatttgtcaagcttaaaatattttagctttgtttgtaatggttgaaaacctttgttacatttctcaggatcttcagaaaaagccttaataaatccccatttgttactttttcggtataaattaacaacaaatctatccattgaatattgtgagatattttcagcgtgtaatatcaccaatcctgtaatcgtattagcttcaataacatcacccaaaatatctgttactaagacacgattacttaaagaaattataccaccatttgaatatattttccgacgtttatcaactgttccagcatctcccaatagggaaacaaaattgtgaccattcctctcagttaaatctttattattatcaataatggaatcagtttcatcggagacattactccgtctccaagataactccataagggtttcctccaagaagttattttcttcctctgaagcattaatcaacataatcaaagatttcttatctcgtatagttgcttgacctaacacatgtaaaagatttgccacaatctgattcaatccgagaccttttcctagtataaccaatccatcatccttgactaaatccgtgactatatgttcctgaaatctaagataaagagatagtgatatatcaattgagttttcctcctcatttaccatatccattactaattattcccgtctattcccactagacaaacacacaatcaagattaaaacaaaacgccaaattacaatccctgggcctctgagaccggagtcaaaaaaattcccccaaccacagaaactgcaggaatttttcaaaggtgagtctttgtaccattaaattagacttctcttaaatttgaagattgcacacatgtctcctatctgtaattatttccttttagctatcattcttggttatatatcaatcggaaaacactgaattatgagtgtaaagataacagagaagattgcttcacttggtgaagatgaacccttcttttcattggagtttttccctcctaaaactgaaagcggtatgagaaacttatatgccagattaggcagaatgtccctattgggtccattatttgttacagttacttggggtgctggtggtactacctctgagaaaactactgatttagcggttacttgtcaaaaggatcttggtttaactacctgtttacatcttacatgtacaaatacacctgtatcagttattgatgatgcattaaagaaagcaaaagaatctggtattaaaaatattttagcattaagaggtgatccagctagagattcaagtgcatctcatggtgctggcgattttaaatatgcagtagatttagttcgttatattaggaaagaatatggtgattatttctgtattggtgtagctggttatccagaaggtcatgcagatggttcatttgaggaactgcaacaaaatattaaaaaagatttaccatacttagttgaaaagataactgctggtgcagatttcattattacacaattattttttgaagttgaaaagtttatagaatatgattccttggttagatcacaggctgaactcaaagatattccaataattccaggtttattaccaataaatggttataatatttttcaaagagcatctaaattatcacatgcttcaattccaaaagcaatattggataaattccctgatgaaattcaaaatgatgatgatgcagttaaggatattggtgttgatgttttagttgaaatgattgataaaatctatgagagaactgataatagagttaaaggtattcatttttacactttgaatttggaaaaatcaattgctcaaattgttaataaatctaaatacttatccaaagttgttgctaaaaaagaactggaactgtcaaacgatgaatcagattcatcagatgatgaaattgatgatgcagttactgatgctaaaagagctgcatatgctagtagatttaatacaacaaataaggttattagtgatctcaaatctgaaaatggtgtacataatgtcaaaatgaatcattcatcttcttcacaattacaaaaactgatttcaataagttcaggtcaaggtgttttaggtaaagatgcaacttgggatgatttccctaatggtagattcggtgattcaagatctccagcttatggtgaaattgatggttatggaccttccttaaaagtcacttcaaatcaagcttatgaactttggggttatccaactacaaaaaaagatatctctaaattgtttatcaattatttattgaagaaattaaattgtttaccttggtcagaattgagtttaagtccggaaactgccttaattcaagaagaattaatcaatttaaatgaaaaatcatatttcactgttgcttctcaacctgctgtcaactgtacatcgagtaaggataaaattttaggttggggtccatcaaatggtttcatttatcaaaaagcattcgttgaaatgttcgtttcaaaggatgattgggatagtaaattattgccaaaattgaatgctgctggtaagtctgttagttattattattcagactcaagtaatcatttcaatactaacttaccacacaatgcttcaaattgtgtcacttggggtgtatttccaaatagagaaattttacaaaccacaattattgaagaagaatctttcaaggcatggacagaagaagcattcgaaatttggaaagaatggaaaatgttatataagaaagacagtgactcagctaaattaattgatagtattttaaacagttactatttagttactgttattcaccatgagtatccaaatgaatctgcattatgggatttattattggaggattaattggaaaagccctgtttttagtagtattatatttggtatagagtataaataaattgtttataatgtattcatgatgatgagtaaatttacgacgttgttatgtttgaagttagatctcgtatcctatttcatccttcaattctttcaatttccttttatacagattgtagttcaactttattattcttcctcctagaaaagttatattttcgttcttcaaatgcaatgtattaatgctaactttggttccaccatgaactaataatttacttcccaactctattctaaatatccctttcgtgtttggacctcttaagaactgtaatggttcctcttcatatgcataacatagattaccaaaacaatcctgtaatatcaatctgtatattacattgttgtttatatgaacattttcagtttcaggaggctcgttatgatcatcattgatatccacagaagtgatgataggtcgatgtcgtgttgcacgattacctttataatgatcctgaaagccttcatttgcgttaatcatatctgttatagtatcaattaaagacattgttgatactgtggtatcacgtacatcaactatctgaaacaatgtattatcatttagtgttgttaagttttcggtttcagctagacaatgtgtataaggtattaaagcacctttaaaagtttcttgaataggatgaaaaattaactgagttctatctttataaatatcttgtactagtacactagacattgacaatcaagttacttggtacagaagaagaaattaagatcaaaaaaaaaattcagttgatcttactttcatgatgcatgcataaagttaactcttaaagcataaacacaatcaaaaaaatatatattggacgagaccggagtcgaaccgatgacctttcgcttgcaaggcgaacgcgctaccaactacgccacacgcccaaaaggtaactgatccctagcaggatcgaactgctgatcttggcgttattagcaccacgccttaaccaactgggccaagggatctgttattaaaaaacaagtccctacgctttcacgtgcccaagctaaaataaggtcacgtgatttgaaaaaatttaagattgaaaggttatttttacaaaaaaccaaatttactttacaattaaaaataattaatttttttaacttggtttttgtaaaacaaaaatacattaaattaataaatttacagttattattaagtaattattcagttttttgtgaaaaacactaaaaagaagtaaatattctacaggatctaccaaaatttataccaagctttatgcaactcatttctaagctttttatagtattcaaattcattccaacatgatctatctccattattacaaccatctaaatttgccaagaagtcacgatcatttttattatagaataaagttttatcatctttttgatcccaacaattaccctttgttaaagaattgatcgcctttattggaacaaatgccattgattctcttatccaaggttgatgggaatagagaacttcaagacaacttgcttctcttctttcccaaaccatatgcatttgttcatacagcacaggatcccaccatgcatccaaaagtaattcagaccattctgattttcttataaggaatgaatttaaattaaacccattacaatcttgtgttatgatcatattaatcggagatgttgttgtatcaacatatggtgcctcagcagtaatatcttgaggattaaaataatttattgttctgtaagcttttttgtcaatatttcttaataaataactagttaaatcaatttctggttccattataaatgtattttgatctaaccaccaaaaccactcagcatcaggatattcacgcattgtttgtcttaaaatatcaactctctcccaaccttctctccattcatgactatatcttcttttaagggtagtatcttttaaagttaaagcataaccgtgtctctctgcgtaatcttttttatttgcaatactagttctttccaatgaccattcttcaggtgttttccaacgttcaacaccaccaccattattaactgctaacaccataacaatttttggactacttgatctagtgaatcgataaccattgaaaatcaaccatataaaaaatagtaatgataatgtagccagtacaattttaccaatataatggttggtttttagtcttagtaactgatttggtattagtttgtgttttaatgtgaatgtttttttatcttttggacggaaatgatcatcgtcatctatatttttttccagatttgagctagcttctagtaaatcattgattgattgagaagtagcattctttctctccatgattgacggtatagttgatgcttaacaatatagatcaataaacaccttttagcaaataacatggatcaatctttaagagtggttgacaaaaaacctatctcgcactataaattaattgaacaccttctggtaactatatttcaagctgtttacattgattttgatttatataaaggtaagaatgtatgaagatttataaaagtagtaaagcatatatacattagtagatagtaaattatatttaaagtgaattcacttaaactttaaattcagaacggaattgtgcaacattcattccaggacgaactttatcaataaggtcccttctatccattgctaagaaagctctttttaaagtttcaatcaaattacttgattgttcagtatcagaaaccagcattgtatcaccatttggagattcaatttcatgcatactcaaaccagtgagtaattgatcaacagcatctttatacattcccatattgataaaggaaactcctaaattataacgagcacgaacaaaattcggatttaattgtaatgcctttgaataagattcaatagcttgttctggtctattagaattagcatatgatgcacctaatctattccatgataatgcatcatttggattacatctgatagcagcttgaaaacaatctaaagttttatcataatcttccattgaataaaataaaacacctaaacctgtttgaacatcagcatcaacatttacaccagatggtgataattgtgcagcttttaaaaataaatttgtaattcttttatttaatgaatatctatcatcagatatatcatttggattttcgagtctagctctagaaacaatatctggatatttagtttcaatccaattttcaaaagttttaaaagctgcattatcataaccttcattaacataagaaattgctaaatccattaatgcagttaaatttttatcatttattaaaagacaattctctaatgctgttatcccactaagttctttttcattctgaatttgtacttgaccaagtttaagccatgcatctacatgttttggatcactttgaactgctgcttcaaatgctaatgcagcttcacttaattttgcaccaccttccattaatttacatccaatttcatatgcattaggattgtttaaaaattcatttttttcttcaaattgatattcatcatgatatttatcatggaaactgggcattgaatgtggcattgaaaacttttcgtcattaggatataaaacttcaggaatttcatttatttcggatgattgttcaaattctttaaactgatcatcccattccgtttgagatagagtattagcatccatagattgtgtattagactgtgattgttgttgtgattgaggattaaattgatgattattcatcatcatattatttctgattgcatacattgatgaacctctcatcattggtcccatattacccatttgtgacataggagaataactttgttgtaatgtattattgatattattactaacaattggagctgttgctgttgctgttgtagtattaaactcttgtgaccaattagcggcatgtggcgcagtagacaaattgttgttgagccccatttgcggctgaagtgaaatattattaagttctctgtgaacaggagcaaaatcgaatgaacccataggaggagcagatagatgatcacctttaaaagaatctagcatagccatattatgtgatgacatttgttgttgagaatgaataccatgtaggttatgtgcattttgaccatttgatgcagcatttctcagaccgctttgtagagaggtatccacatctggtctctttgctaactgtgcaagaggattagctgaagaggcacaatcagaacctccagctagaaaagacatgtgtgataaatatgacagatatatacaatagatacaatatatttatccagttataaaacaatgtaatggactgaataaataattaagtgtggtgaaagtctatatattaaatttcatggagataatcagaagaaaaaagccggttcaccctcgtccagtaatagaaaatttcttttagcggggtataccagttggtttgaaaccattgattattattaagctacaattccatctctttcactggtttatatctcttccttacgctggtttatttgctctgcaaagtcaagaatgtcctcaaagattccatccactgctgcacaatcactttctcaaaagttattcaacaaggaaaatttgaaatatgtgtttacatcacatttttggggacctgtctcaaattttggtatacccgttgctgcaatgattgatttgcgtaacaaaccagctgatacaatctcaggtccaatgacaggtgcattgattgtttattcagctgttttcatgaaatattctctggcagttattccaaaaaattatcttcttttcggttgtcacatcgttaatgaagtcgctcaattaggacaagcttttagatacattaattacaattatcttgaagaaaataacagcaagcaagaatcaaaataaattctccacacttttctagttctaatgtgtatatactaaattctataaatatattttatcaaatgaaattcattgctcaatgattatcaaaaaaaaaaaaaaaattagtcaaagagacctttgattaacaccctttgtgttggtcctaagtactcatcatcattttcagttttattttcatttatgttttccttttcagcttcattctccctttcttctgttaccttattggaatcagatttatctgatacatgatttttctcaactactttagtttgatggaacttactattgagccaaaatatttgttcaaaatcttctctattctcatctattatcatcacttaataatttccgtcttttagccttgctatgtgtatcattttcttcctgataattatcattaacattattatcatcgtaaaactcagcttcttctgcaacaaataatggttcattgatgccatcatcacgctcaaatctgttcatatttaaattattatcaccattactattattatcattaattgtagcagttacacctctactcaaactaaaatccctttcactatcaatcaatcttctagtaaatcgttgattcatagcatttatttgattattggtaatattgttgatactactattttttgtatgaagagtcaacttactagactcaccatccgttatttctgtcaatgtaactgaacaacaatcattatcctgtaattcaccattatcaataaaatatcttctctcaaagacaataggatatccaggtttcgaaaatattatatcacaaatattctcaccattatcaaaatgcatactcttatctccatatttggataaacttctataatttttacgattacttgtatcatcatcattttcatcattctctaagaattcagataaattaccactaattatctgaataaaagttttaaaattctttaatctaaatgaagcttggatctttttactttttttcaatttatctttttcgttagtatcatcaccatcattataatctttgaaattattataaactatttgatctaatctcatttttatgtctaatgtcattggtctgtttactaaattagtagatctaatagtatgttgctgtcgattatatcctttaaaagtaattaatccaacagttggctcaacttcaatttgaaaatcttcaagctgcacaggaaaagtttgtaaaaatgatttcaatataactgaatcaacggcaattctatgaaccctttcatcattaaagtcatcatcatcgaaatcatcatcgaaatcatcaccatcattatcatccatctccccacctccattatccagtctcaacttaagctgcttttcatcacttattttttgatctcctaatgttttcaaataagtatagtgaatctcactatcaaatccattgaaacttggtcgataacttattgtatatttcttcttcataccggatttagtatcaaattcaacaaataatctatttgagtaaatcatatgcgttgtttcaccacttgccaataaaaatatcttccaacttattgcatcctctccacaatccttaaacaatacattcatatctcgactatttaccacaaatgtataacttctagcataattatagttatccattccactaccagacgcgttattcctatctctaacaacatcttctatttcaccatcaatggtaaatttcttgaaagaatgttgtcttgaatgaagtatttaaaatagctgtcttagttttattcatcgttacaaacagtaattctgaaaaacatttccttccatattgatcaacacctgaatcttcaccttgtctaatgacaattttaaaactatcggatattgtataaaatgaatttatcgcctttgtccacagagcacgtgcatctcgtgttttgagctctatctctgcacgaaatggcattatttacaaagaaaagaagaagatcaagagggccaaaatgaaaatgcaacacgtcaaattttgctcagctcaggatcttgtttaggaaactttattattattattattattattaatatgcgaggtttgttttcaattttgaattttgtttgttcaaaccatcttttaagctgagcttataatcccatactacacgttaaattgacaatctcaagccacaataatgaaagtggaagagttggttattgatggatttaagtcttattctgtgagaactgtgattactgattgggatccacaatttaatgcaatcacaggtttaaatggttcaggtaaatcaaatattttagatgcaatttgtttcgttttaggtattacaagtacaacagcattacgtgcctcaaatttacaagatttgatttataaaaaaggtacatccggtgttacaaaggcatctgtgacaattacttttgataattcagatcctgatacttctccagttgcttataaaaatgatagaaaaattagtataactcgtaaagttgcagttgatcaaccaaattctgcaagtacaaaatatttgattaatggtagaaaggcaactcaaaaggaagttgctaatttattacaatctgttcaacttaatattaatgatccaaattttctaattatgcaaggtcaaattactaaaatgttaaatatgaaacctaagcaaattttgagtctgattgaagaagcagccggtaccaaatcgtatgaggcccaaagagattcatctgaaaaaattatgagaaagaaagatgctaaattagaagctattaaagaaacaagagatttacaagttaaaccaaaattggatgaattagcaagacaaacagaagttgttatagaatataaaaataaagttaatgaaaaagacaaaaacgcacaaatgctttactgctatttataccaagcagggctagatactataatggagactaaagaaccattacgagagagtaccgagaagcttgagaaatgtaaggagtcaatcgaaaagtataaaagccaaattgagagattgacaactgaaattaatgagataaaggaaaaaaataaatcaactagtgactctgctaaactaaaagagttagaagcacaagagcaagacttatctaattcaataacaagattaaaaactgcgatgaactctaagattgagaatataaaagaaataaaagaatccataaagttaaaagaggcggaaattcaaagaaatgaacattcctttaataacaaaaaggataaattttcagaacttcaaaataatttcctaaaggaagaaagtaatttgagaaatttcaaagaggtattacaaaggaaggaagatttattatctactctatctaccggtatttcatctaaaggatctagctgactcaggttatacatctcaattgagagaggctaataaaaaattatcagaaacgaaaacattaattgaacaagataaaattaatattaggcatttagaatcacaatgtgatactaggaaattagaagcttgtaaaaaggaaattttaaactatgaaaatgaaatttccaaaagaaaacaaacagttgagagtataaagaatcaattacgtgtgaatggttttgatcaaactgaatatgaaaaattaaaacaagaagagaaaaccttaatagaacaactaaattccaaaaatcgatatttacaagaattcacaagaagagattcaagatttgactttacatatagtgatccagttcctaatttcaatcatagctcggttaaaggtttatgtggtgaattatttgatttacctgataaaaataaaacttcatcaacagctttagaagtttgtgccgggtttaaattattcaatgtcgttgtcgatactgaaaaaacaggttcgttattattacaaaggggtagattaagtaaaagagttacttttgttccattgaatagaatttcatctaaggttgttagacctgaaattttgaatgaagctaaaagaattgcaccgaataaagttgaacttgcattgaatttggttgaatatgataatgatgttggaaaagcaattgaatatgtttttggtaataaacttatctgtaatgacccagaaactgcaaagaaagttactttcaatgataagattagaacaggttcaattaccttagatggtgataattatgaccccgagggtagattatctggtggttcaagaagaacttcaaattcattaattaatcaattctcaagatataaagaattgaaacatgatgttgatacaattagaaatagattaaatgaaatatctaaaattttaagaaatatgaatcaagcagcatctaaaaataatgatatccaagaacaactagtaggtgaagaatataatataggtttattagagagaaaacttgttgaaagtaatgctgctatttatattcaaaattttgagaaaaatatggaaaaaatcaaagaattaaaacaattaattgaattaaatgaaaataatgtgaataacattcagcatgagattagtgagattaataaagatataaatgaatttaacagtgatggttctaagaaagttagagaattaaaggaagaaattagtagaatgacagcagaattaagtgcaaaggagaaaaatttaacaaagaaaagatcacttttcaatgaagaaaaagttagaaatgaagatttaatgagtgatattgagacatggaaggcagatatagcgaaattaaatgaagatttacccgaaattgaaaatttagtcaaggaagatgatttactcattaataaatatcaaatagaattagaatcaatagttgaacaaattgaaatagagagagaaacagctaatggttttattcaagaattaaatcaattatctgaacatttagaacatacaagaaaattactttctgaatcaaatagtaaacatgaaaaatatcttgaagaatcgaattattataaaagttgtgaaagacaggcagtaaatgatatgaaggaagccaaaaaattatttagttggattgaaaatgatgttcaaagaaagaatatacttgaacaatatccaaatattgatccagaacaatgtcaacaaaaaatcaatgaatgtgaacaaaaaattatggaacttagaagtaaaggtgcagatgttaatattattcaacaagctgatatgcttaaaacccatgatgcatcattagagaaaaagattaaaaagattgaaaaggataaaatgaaaattcaagcaacaattacaaaattagatcaatatttgaaaactgaattaaataaaacatttgaaattgtttcaaaagaatttggtgaaacttttgaacttttattaccaggtgcatatgcaaaattaattaaaaccgatacctaatggtgatataacaaaaggtttagaagttaaagttagattaggtaatgtttggaaagaatcattagttgaactttcaggtggtcaaagatcactagttgcattagcattaattatgtcattacttcaatttagacctgcaccaatgtatattttagatgaagttgatgcagcattagatttgtcacatacacagagtattggacatttaattaagactaaatttaagggatcacaatttattgttgtttcattaaaggaaggtatgtttaccaatgctaatagattattcaaagttacttttcaagaaaatacttcagttgtcacatcaaattctaactaattagtaaaatttttttgaacattttttgaattttttaattcttgtatatcaatagatttaaatttagattttttctttattgaatttgtatttattagatttgaacaatctattatatcatgatttttattttgttcataattttgaacaaattgataaatttcattatcaatttcataagttaatggatttgagatgatgtattttgttttacgttcaattaaattttccttattatttatactaattacttcattttttgaaagttttaattctttgaaaattaaatattcatattcttcataggataatgttttaatatcattatttttattaaaatttattatctcaagtggatcaacagatatatcatctaattcaagatggaaaatttttgagtgattaaacatatcatgaattttatgatgaattaatttaaaattctctattgaaagttgataaactacaaattttacatttcttatgtgattgaaaacatccgatgtctccttatccatacttagtgagttaatggaatgttaaaatctttacttataaaaaaggggtaaacaaaaatctgtgtaaataacggggataaaaaatgaaattaaaaatgaaaaacaaagtcataaagggaaattattattctctccaagtaccatcatgaataatagttttattaacacctttaacagaaacaatattatcttcaactaatataccacctgtactaccagaacgaggttcattatcatgatcaatattattaaataattgattattttgttttggaactggtataccataagtattattcaggaaagatttctttactttctttaaaggatcatttggatcattaggtgaaccaacatgacaatcatctggggaatcacatcttgatgtatgtcttgaagcattattataaataccttgaattaaagctgatgcttcagatttgtgaatttgatgatcattatcatcaacattaatatttttatctattatagtatgattgtcatcatcattatcattattatgttgattatgtttattattattattattattattatcatttttattattattgattgtttcaagcccgccataatttggtatcatatcaggtggaggggataatgatgatctttcactattatttgtaaaacttttctgtaaattagttaaaggtttattatttggagaagttaataattgaggttgtttcttaattgtaatatgattattatttgtctttaaaggatcagaagctaaatttgaaggtttaataccttgtaaagttttagcaaaactattttttgattttgatttattataattatcctttgaaatataagcttgaccatttaaattatgagaattaattgtttcagttgaagtgatagatgttttgcttgttgatttatacaaattatgaagatatgaagtaacatttctttttgataagggaccaggtatttctcttttgatatttttattaacatcaatataaacatcagtttcatcaacaatttcttcaccgattaattcttcaataacatcttctaatgttacaactccaattgcaccactatctttaccaggactttcacttacaacaaccatatgagatttaccttcttgaaaataatttaaaatatttaaacaagaagtatttaatgaagtttcaggtaatgttgcaagtggaaaagaagaaattggtaattcatcttcaggatcataagaaattaagattctaactaataacataccaacataattataaggttcaccagggaaatgaattggaattcttgaaaaacctgcattaaaaatttcttcaacagttttttcatctaagattttatcagatggtaaagtataaactttttcaattggagtcattatatcacaaacaggttttgcctttaaatctaagacggcattaataattgtaacttcatctaaatttaatctttcagtacccattgtatgatgtaaattaactaaactttttaaaccatttttcctataaaaagttccatgatcttcacctaataaataatctaataatttagcaattggataagcaattggatacattatatacattaagattaaaacataaggagcaaagaaagcacctaattctaaaccataacgaacacaaattgattgaggtataatttcaccgaaaatgacaattgcaattgttgaagagaaaacagctgcaaatccaccacctaataatctatctaatataacaggtaaagtttcatttgtaataacatttgataataaaagtgtaactaataaccaatgtttacctctacttaaaagagctaaaactttatttgaacattttttttcattttcagtaccagatgaagatataactttaagataaacttcatcttgacccattaaaccaagagttaaacctgcaaatacaccacctaaaaggacaagtattgaagaagtaattgcataaatatataattgactttgagttaaaggaatttgttttgtaacgttcatacaactatcattgatattatcagtaatagtattatttgataataattttttaattggatgtaattccactggaattgcatttgatattacaggataaatagaccagaaaagtttaataatttgagattgagatgaacgattgggcggcattcgataattaaaaagtagaatttaactgtaagaggagagggaagctgtagagaaagaaatataaagagaattagagaagtagtaattataaatataccgtgttaaccgattattattatgtaaaggctgataatgatattcctctcagatgttctctcatggctggcaagtggccctcttgtggcaaacacgtgtgtactaagtatttaaaaaaaatattgaaatttaaagatcgtattacgtaatgaatatctttgaaatatttattttttttattttttcactttgaagatcaaatttttgcccctttttcaattttatagaaggctcattaatcttttcaattgattgacatgtaattctcttcttttgggataatcaatctgctatggctaatcgtatagcacatatcaggagtactttggcagatttatctaatcttcaccactagtaatagtaatactcccaattgggaatctgtatttcaattattagataagtttaatcttcaattaaataataactacattaacctaccgaatttaaatacttatttgaataataagcttttaaaattattaccaaaatactgaacattccttattttctgttgatgataataataatcaacaacaacaagaacaacaacaaaaaaaattattcttatataatcaaatgtcaaaattttattctaaagaagaagtagaaggagatgaaattttaaattcaaattcaaatttagattcaatttcgatttcccaaattaatcatctaaaagctcatataattaaacatgaaattcattcaaattattttcaaattagaaatcatagattaaatgaattatcaattattaaagatcctctattctcaaatgaattattagttcatacttactgtgatgttgaattaattcattttattaaattattaaataatgattccttccttcatagttcctattttagatattatgaacagatttgtaaacattttaataaaattttaaataatactaaaattaataaaggtaaaggtatttgttcaaaattaagaccttcagatttagaaaaattaattcaattatttatttattcaaataaagctttaaatgtaaaggaaagacaaaaattgaaaattaatgatataattaataatattattcaagatttgaaaaattcaaatttaaaactttcaaacaaagaattatttactttattacaatttacattaaagaaaaatttaattaatgatgaaaaaaataatgaaaataccaattcaggtgattcagatgaatcaaatattattaaattatatgataatttcattaatagtacaacttttgaaaaagatagtgatttctttattaattttttaaagttaaatatttcattatcatttggaaataataaaataactagtaaaacttttgtggaaaagattttaaaagatattgttaaatataatgttccaattgatagattaatgttaaaatatattcttaaatttgcatcaattgagaaaaactcaatattatcacaaattattattcaacatattttagaaacttactctctagatagtgaaacttttacaatggttcatttggcaatttccaaattgagaggtgaagaagagagtaaattgttgaataaactaacaaaattaaacaatgaacatgagaaattgattaaaaagttcccatcaccatcaccaccatcatcatcatatgaggaaactagattcaacacaagaatcttagatcatctcattgataaagaaagtgttaatattactgataataatggatttctttatagagagaaccggaatttacttatagcaccgaagcttccggcatgaaaaaacggaaataaaacttaaaattttcaacgagcgaattgaattgaatttttccattcctcccattctacccgatgtttgatgttgtcactaataataaaagaagtaacatgaggttttctcctatactgtttgatacttattccactggcacgtttgtttattccattgcattattagattaaatacatcattttctattgcaattgattattacagagatattgtcatcattgtctctaacttagattaaatacaaattatataccccacaatgcctgtcaatggttttttagctaaattatttaaaagtgataaggataaaaagaaagattctcataaatcttcaaataaaaatttatcatcatcctcacatcactcatcgccatcaactacaccacaatcagatttaccaattggatctcctactcatccaagatatagttccaaatctgctgtttctttaagtaactcattatctcaattggcttataaaaattcaaataataatgataaaaatgtttcatctactaatatgacaccatcttcctcttcaacttcagtaatacaccctgttgattctcataatcatcatcctcatctcaaattagcaagatttctcgaaaaaagacatttaaaacacagtgattatctcaaaaataataaaaataataataataacaataataacaataataacaataacaattcacaacctttagtacacaaggctttatatccttcaactgcatcggtacaacatgtttcattaaataaacctcacagctctaaattcaataattatgaagcactgactgaacttgtctctcaatatggttatattcctgaccaatctgttgacttaatgaatttattagaacatactgatattaactatgatgttaaaattggtgaaaatggtaaagttgaaaaaagtaaagaagaaattattagagaaactagtaaagaaaataatgaagttattgaagtaccgagagcatatactgaatcaactgctttagttattggtaaaggtgcaggtggatcagtttatccattatatgataaacaaaataatcatctttatgcaatgaaaaaattaagattacaatcatcaaaggaagattggtcaacttatgaaattaagttaaagaatgaattcaaaattgcaaataaattacatcatcaaaatttaattagaacttatgatttattacaagataacgatttatttataattataatggattatgcaccatatgatttttttacaatggttatggcaggaattttaacaaaatatgaaatttattgttatttcaaacaaatgtgtacaggagttcattatatgcattcaattggtttagctcatagagatttaaaattagataattgtgttgttgataaaaatggtattttaaaaattgttgattttggttcatcagtcattttcgatgaaaatctttatttaaaaaggggtaaaagtgaaaaaaatgctagtgcaacaggtattttaggtagtgatccatatttagcacctgaagttgtaactgtaccttattatgatccatcattagctgatgtttggtcattagcaattatattttgttgtatggttttacgtcgtttcccatggagattacctaaaaatacagatatttcatataattatttcataagtaaacctggtgaaattattgataaagatggtaaaaagaaaattgttggacctgatagattactgagattattaccaacatcatcaaaacatgttattgatcatatgcttaaagttgatccaagagaaagatataatatggatcaagttcttgaaagtcatttttataataaaattaataattgtcattacgaaaattatgattcaaatagaaatagaggtactttaattaaaggtactgatcatgttcataatttggttactaataaacaattttctgaggaacatcccgatgaggttgtacaagaaaagaaaagagaggaggaacaagcaaagagaatactgagtggtgttatgtgaattacgatttactcttgtactaatatattattactctgacatttttcctttctatttataattatttatttaaaaacttatttaataattccggcaataatatacctttcttttctttctgttgtgagagtatacattaagatattaaagttataaattattataaaatcaagaaagaatagatagacagaaagatatgaaattaaatttcagaattataaataattgaaactgattcaccattattaattcttctaattgcttcagcaaatatccttgaaacatctaaaatatcacttttaacattaaattgtttattttgtaatctatttgattgatctaaagtatttgatgtaataacttttgtaaatagacctgaattttgaattttttccattgcatcaccactaaataaaccatgagttacaattgcataaatttcagttgcaccatttttttgtaataattttgcacatttaattaatgtacccgcagtatcaactaaatcatcaacaattacacatggtttattttcaacatcaccgactaacattgataaatctaaattattaaccttggttcttctctctttatgaactaatgcaaatgataatgacattgaatctgcaattgcagcagctctctttgcaccacctgcatcaggtgaaattatgacagaatctttaaaatttggaatgaaattagaaatataatattgaactaattgtttggaatataaattatcaacgggtatatcgaaaaatccttgatattgagaatcatgtaaatccattgtaataatatgatcagcacctgcacttgttaataaatttgcaattaatgtaccattttgtgcaatccaaggttttgaagattcttcattattattattaatattaatatttttatttaaattacttgattttttataaaatcaccatttttaacaactggcatatctaattgacgtgaatagaaaaataatggcattataacattaatcctttttgcacttgccattttacatgctgaaatcattaataaaagttcaatcaaatgatcattcacattacctgcaccactttgtaaaatgaaaatatccttttcacgaactgatgtctctaattgaactgatgtttcaccattcgcaaatttttgaattaaaactttaccttgtggtaatgaaagattcttacaaattctttgtgtaagtgcaggatttgatgacccagaaaatataacaatatctctcattatttatgcgtttagtagttgtttgtcttccagaaagtaaaagaagaaagctacagcttaaattatataaattccccagacttttattgaataaaaaaattctttaaaaaaattcatgcaacgaaataatcatgctaacttttttttcacccaatttcaatcactttatcattcaattctgatcacttaattattcagattaatgtcattctcagatatatataattatacaatttacatgaatatacacacatattagtaaaaataattataaaagaccatttctattgttcttacgttgtttttgtttgtaaactctatatccaataacaactgcataacaagctaataatattcaaaactaagtaaaagatcattttgataaatttccaaactaatccaaagaaccaaccaacaaatccatgttctgaattatatttggccttatctgcttccttcaatttcttttcttgtctacgtaaacgattaagtgattttctagcttgacgtcttctattaaccataccattattatcattattgtcgtacttattaatatactcatcagtatcataaacttcaataccttgacctaatgaatcaatttcacttatttctgtaccatctttatttctgaaagttttaacattaattgaatataaatcaacattatgatgtaattcaccagtttcagctgagacaccaagatataatggtctaccaattgggaaaagttcatcaacttcaacattttcctttctgaagcaagttctccaatcatttgtaccttcaacatctgcaataatttctaaaatatttgcttgacgaatataagtaatttttaatttacttggattattacttttatcagtattatatatacgatgtaatgcacaaccacccaattgagtctctaaaccatcctttaatttttcataataattaaatattcccttatttctttgaatacttaaatatgggaatgcatgtctatttcttttaccgttataatttttataagtatcaaggaaaaaacctaaaccattaaaatcactttgcataccgaaaacatcacctgattttaattgttcagttgttaaccaaattgccataccatcaccaatcatacttgattttaattgttcaccatgaattttaaaatcaacttcaatttcaattgctgataaatcttcagttgaaattgttgaatgtgaaaatagattaccattttgtcttggtatatcctttgtaagtctgacataatctgaatttcttgataataacatattaccaccatttttataatgtgggaacttattacttgaatcaaggaatggcggtaatgataaataatttaaattaacttttgaaacttgtggtgaattattaagtaaatcacttaatgtatggaattcattacttgaaatacgagtaatatcattattattagacactaaattatcatcactgatatcaataacatttttagaactagaacttgaccaacttggtaaaagaaaataaaatacaattaaacctataacaccaaatactatcttacccttaggtgttagtcgagaataaattcttcttaacttatgtagaaaacttggagtcccaccagtttggtattccattgtcaatcagtgttggttgtcgttgtttgtaagttcaaaagagaaaccacggtgtcaacatatattgaaagaaccggaatttcgaatcaggtcaaatttcagtgattcgagaaacttcgtttctatttgatactccaaggtattttaacggttacaagttaacgataagttatgtttattattatgtaagtaaaagtatatatataggatgtttatctgatgatgatagtgatgaagattatgattatggacgttgatccattgtactacccattgtagccattgtagccattgtacacattggttccattgtttcacttgatgcattaggttcaagtaaagacattgcaccaattgattgtgaaacatccattaattcattattatcatctccatttttctttccattattatttgcattataataatgattattataatgatcaactgtattataatgaaattctttattggtatttgtatttacattggattcagattcttcattaccacttttcttactctgtatactagttattgatgctaaactatcattactattctgtgatacattaatagtagaatatttgttatcttttccatcatcattttctttaacatctatattattatcagttccattattttcattactttcatcattattggtattatcatcgtcattatcattatttttagtgtttttactaatatcattttctttatcaccatttgtaatagtttttctttgacgacgtttagtaatcagtttcttacgtggacgttcttgacctaaaataactttagtattatgaccaacaccaggcattgggaaaatacttgtataatttggtatgattgtattgtttgcaattggttgtggtaaatgttgaggttttgatttttcattatttcctgaacgatgatgatgatggtgatgatgatggtgatgatggtttccctgtgtattttgttctgcctgtgcctgtacttttgcttgtgcttgagctctggcctgtgcttgagctctagcttgttgttgttgtaattgtaattgttgttgaaattgctgttgctgttgtaattgttgttgagcttgtaattgatgttgaaattgatgttgcaaatgttgttgttgtaatttttgttgttgaagttgttgcagttgtatttgtaattgcttttgttgttgttcttggatttgttgttgttgttgttgtaattgttgttgttgtaattgctgctgctgctgctgttgttcattatcatttatgttaggtgaggaacttctaaaagtagataaatgaggacgatagtgtttattactaaatggaccacgagatttcaaattattacttgattgtgatgaacttgaattattaaagttatttggattataaccaccaggtccatatttgaagaattttttaaatacgttttcatgtttatgaacgtgttgttcagattgttgattattttgtacaaggttttgttgttgttgttgttgttgttgttgattatatgtaagattttgatgtgttggagttgaaaatctttcagtttgaggtaaattagattgagatgatgatgaaactgaaactgatgcagatgtaaagtctgaagaaactgatgaagtatcgttattattatttttattatcgattgatgaacaagagtctgtatcaaaaccaaaaccacattctgtacatgatttacattgttttggttttttatgagcatctttattattgaagttatttttattaactccaccaatacccggtatatattcattttcaacttctatttgatctaaatcttcaatttcacctgatctaattttatctaaagcaacatgatcaacaggtattggacaagtttcaaaatatgaagtattatcagagaattgattattactaccatttggtataatattaaatttattatttttattattcattaaaatcatttgagattcagttgtaattatatccattgaatgaattgttgaatcaattgataatggaccactatctgataattttttacagtttaatatatcatttctaaaatcaaacaaactacctctttcccaaggatttaaatcaagatatttaccaagtataatgaaaatttcttctgaaattggtaaaattttcattaaaattcttggattttgaacaaatgctttaaaagttgtatcatgtaaacttgcctttaaccaaggatttctaattgatattaaattaattagtataattgctaatgaccaaacatccccagcactcgttgggaatttaacattaccatgaacacgataatttgaatcattaaagttattattattattattgttattattatttccattattattatttgcattatcattattatttatattcattaatctttctatatgaattgaatgagattctaaggaattaaaggcttgactaaaattttgtattctttcaggagacatataataacttgaaccacaagaaatatttgaatttatgaatttatcttgtaatgctaaaccaaaatcagccaatatcattttttcaccattattagcaattaagatattttcaggttttaaatcacaatggaaaacagattttgaatgacaataattaattgcatcaattaattgaatgaaaacagatttaattaagaaaggatcatctttatacctttgtttatcaacaattgttgtaaataaatcaccttcaggataataatccattataacgaaaattgaattttggaaatcataaactttataaattgataaaatatttggatgtttatgaacttttaattgtaaactaatttctcttaaaaatttacaatcagtaccataattttcaattgaatctaaacttaataaatttgcattaagacaaccattattaagtaaagattgataaattaaacttttctccagttcaattaataattgtttattatttgaagtatttgaactattattttttaaaataattttaattgcataagagataccagtatataaatgaacagctgaataaactataccataagaaccagaaccaattcttttctttaattgatatttattatttaatattatattagataaatctttcattgacatgatgatgaaggattattattattattattttagtttatagtttatggtattgtgaaattattataatgatgattaaattattaattaatgatgattaaattattaaaatgacgataaagaaagaaataggacacgagaagagaagggggtcagggatatatagagatcaaattaggagtatatagattcacctctgtaatgagtttattataatattaatattatttaagttaaatagaacaatattaatacacttataagatataagatacagtctcgtccattgcatcattaaatgagttgaaattcatcagaccatattttaacgatgagtgatggagatgaaaagagagagttaaagattatcaccgttatgttcttccatccatctatctactgttaagataatatagtgatggtatttacaagacactgtgcatttgttatattacagttatagatagatatagatatagtctatagatatagtcaagattatccccttttcactatactctaagtactattactatgaagtaggcaaatttaaatttcaaaaatcacgttttcgagcgtatttattatgaaggctcagttttagttgggtttttcttgcttttattcactttctttgtttgccttttctttgcctttggcttttctctttgtttctcataagaaggcaatattatttaaaccatatgcgtatatgtgtactcttattggtatctattatatgagatattatacactaatacccgtaatcacttaatactactacatactattactatactataacacattacattatactgataaacgagacaatattacctaatcaaaatataaattttcgcgttgaagaaaattaacattaaaatcaataatttagtttcccaacttgattttatatcggatttatattactttgaaattgataaattattaattttgatactagaggatatacttatattaattagatcatcaatatattcaaacacatcatacaatggcagtaattgatgatttttttcggtaaaaaaactgttcaacagaataaatctaaacgtaaaccatctgaaaatattactcaatcatcacctcaaaagaaacaaaaatctgttaattcaactacttcatcatcatcatcatcattattattatctgctgatgatatattgaaaacaatccctgatgctgatccttcattacttgaactatcccccgatacagaaaaattaaattatttccaattaaaggcaaaacgtgaatcaaatccaacattaaataatactactacaacaacaactgatattaatgatatacctgaaggacgtgaaaattgtcttaatggtttaacaattgttttcactggtgttttacctaatttagatagagatcaatgtgaacaattagctcaaagatatggtgcaaagataactaaatcaattagtggtaaaacttcattagttgttattggtaatgatgcaggtccaagtaaagttaaaaaaattaaatctttgaaaactaaatgtatcgatgaatccggttttattcagttaataactgaagatgccctgctgatggtggcttctggtgaggctgcaattaaagaactaaataaaaagaaagaaatagaaaatgaaattaagaaagaaattgaagaagaacaaagattagaggaacaaaatgcggtaaagaaacattcctcaaataacccatcatcctcttcatcctcattatcagcacctgcacaaccaaaagtagttgataaaaatactcaattatggactgataaatattcaccaactgatttaaaacatatttgtggtaataaaagtaatgttgaattattaaaaaattggttggaaaattggttcaatacaaaacatgatttaaaaggttctactattaatgactttaaagctgttctaattagtggtcctccaggtattggtaaaacaactgccgcaactttaatctctaaattattaggttacgaagtaattgaaaaaaatgcaagtgattttagatctaaaaaaattttaaatgacaatttaaaagtttgtttagataatacttccattaaaggattttttgatcataataatgataatatgaataaaaagaaatttgttttattaatggatgaagttgatggtatgtcaagtggtgataatggtggtgtttcacaaattgcacaattttgtagaactactaaaactccaatgattttaatttgtaatgacaaatcattaccaaaaatgagaactttagataaatgttgttttgatttaacatggagaagaccatcatccagagaaatgaaatcaagattaatgtcaattgctcatagagaaaatttgaaattagatcctaatttaattgatcaattagtttcaattactcataatgatattagacagattattaatataatgtcaacagtttcaagaaatcaaaatagtttaaatcatggtaatttaaataatatgcaaaattcttgggaaaaggaagtttcattaaaacctttcgatattgttggtaaattattatcaaataatagattatcaattaatgaaaaaatttcattatatttcaatgatatggatattgttccattaatgattcatgaaaattataaaatgacacagcctgttggtggtaatggtggtggtagtagtaatagttcattaaatcatcttaaattattagatgaagcaagtgatttaatatcagagagtgatattgttaattctaaaattcgtagtggtgaacaattatggtcattattaccatttcatgcaattttatctacaatttatccatcatttaaaattcagggacaaattacaaatagaattaattttacaagttggttaggtcaaaattctaaaaagatgaaatttgatagaattgttcaaaatttacagtatcatacatgtatcaaaactaaatcaaataatgatgatttacgactagattatattccatttttaaaggataaattaataaatccaattgccgaaaatggtaatgatggtattgaaacagttttaaaatttatggatgaatactatttaacaaaggaagattttgataatattttagaactaagtgttcatggtagtcgtaaaattgaagataagtataagaaagttcctacatccgttaagagcgcatttacaagaaagtataattcatatattcacccaacagttatttacaaaactggagattctgtcggaaaagggggatcaaataggctatcccgcggcgattctgaaggtggcttggagggtgaagacggagatgtggatgttgaaagggatggtgataatgatgaaagtgatgataaagatgatgatattagtcgagattctctcatcaagagtaagactagacctagcggcggtaaagcaggtgctaaaggtagtgctaagagcaataccaaacgaacaacgggtggttctaaagcaggcaacagtcggaaaagccggacttaagaaaatttcaatggcagggtattttcaaaaaattgatttcttatgaaaatttgtattataatgatttatgtacaattcatattattaattatgtaccttatttccgttttaatcacaattggttcttgtatctatattttataatctatattttataatctagatttactattatagtgacatagtctaacaaccataatcttcatataataattaaataatggaggtcttagaacaatatgcaagtgcattaccaactggtcttcagacaaaggtatcccaattaacttcaattccatcaataacatctattccttcaacaatttcacaaaattatgaaactattacatcaattatagcaaaggcagaattacatcaaagatctgcttatagtgcattgaatgttgtaactgcatcagtttcatcgattagtttaattaatgatattattcaagctcaagcaactttaaattattacaatgtattagaacaagctgcaactgtaactaatactgcatctcatgcaagtttaatgacaaaagctgctcaagcaagtgaaattatgcttgaaatgtttaatgatgaagcttactatagtggtaattatccttcatttggtggtaatattgcattagttgtagttttttcaattttcttgacatttcatgttatttcaggtgtcttctatcatcaatggtggtttttattttgttggacttgtggtcttgctttagaaatcttaggttatgcaggtagaatttggtcatcacaaaatattatgagttttgatgctttcgttatgcaattagtttgtttaacattaggtccatgctttctcatggcaggtatttattatgttattgcacaattaactttaatctatggacaaaaattttcagttttaagaccaatgcaatattcatttcttttcattattggtgatttaatttcaattattttacaagctgcaggtggtggtgtagctgcaggttcattatctcaatatgaatcaacagaggatggatctcatattatggttgcaggtttagcatttcaagttttcacaattgctgcatttcaaatattttggtatattttcttttttagagtttatcgaagttataagaaacatggtgattcagaatttaatccacatttcactcatattagggaaagaaaattccttgttccatttatttttggtatctcatttgcagttgttttaatctttgttagatcaatttatagattaattgaattagctgaaggttggtcatcaaatttagcaacaaaggaaatttattttatgattttagaggcattaatggtttctttagcatcatgcgttttaacatttttaactcctggtttggcttatggtagaaattctcatctttacattgataaatcattaaaggcaacatttggtaagcactataagaataataaagatcatgcaatggataatccagaaaaggatgaagatagtagttacaataaaaatgatatcacatcatccaaaaattattctgatgatctcggtttagatttagatagaaatgaaaatagacaatatgttgtttaattatgatgttatcttataactaacactaacctttaaattcatttttaattcgtttttattaacacactcaatatgatattacattattgatttttatttattgacatttattttattctaattaattgattcaaattatgatttattcccatttttttgttttttttccccagtttaactaattttttattctaacggtatatttataatgtttaagttttatataaatttaaaaaacttttatatcttttaaacaagaagaaaagaaagaatattaccatttaaaaacttttaatacatcatccatacacacttatatacttatacttatacttatacttatattaatagttggttaccaactgattgcaattgtataaccactccaaaaattagcaattgaaataagctgattacaattaagtttaaagtttttcctcatgcagtgggaaaaaccgtttttttcttctatttacttttcattttaatgatcttctttatttaacttttgccttcgtctacttcttgttttttatatctattctgtgtataggtatcaaacaacgtatatagtacaataatgtgctgattactgaaaggaatgtagtgtttgtctgcagaatacattaacaaaactttctcccgtattttcacccgtaatggaaatacttaactataggatgatattatattgattatctggtaaatctctacttttaatcacacatctaattaacaatttcttataataccattagcaatcaatcggtcgacattattacacacacaatgcatttacttgtaatgtgatacatcacaaaggcaaaataatcacatcaaaatttttcactagcccatttacacattacgcgtatcagcattagttcttttgtaaagatcaattctaatacattttcttcactgaaatcaccaacaaatgctctcattcaaacgtctcaactctactttgaggttaaaaataccattacccgataatataaggaagttaaaagaactaaatcatactataataaagaaaagtgataatgataaaattgttaaaaaacgacaattactcagataacgaagttatggataaaataaatagtatatgtaacgttctttcagttcaaaacgatattgctgatagtaaagatgtaaatgaagtgattaatttaaatatagcatctaataaattagttttggattctacaatgtcaccaaatgataaagtcaatgctctttgtaaatttctctcagttgattcaaatagtgaatatttaccattaaaaatatcagagaatccaagattaaagacaccatttgaggaattatgtgatattaataaatctaataaaaataatgataagacaagattatcagttactaaaattataccttattcttattgtgaattaatgaaaatttatgaattatatttacgtgataaaaaagttgataatattaatattattaaaggtaaacaaattcatagagatttagaactcgataatcatcctcaaatgaaaatatcaattcattctaatgatggtgataatattgtaggtatcgataaaccagtttcaataatagataagaatgatccaatctttgaagttaaacgtgatattccattttcaaatattgataaaatttcactcaaaaaactggttacccccgataatactattgaatcagatcgtgaaaggcaaattaagcacttaaatcagttaggtgttgaaccaacagatgataacgtagtatccaaacaaccaactatgatagataaaactactaaagtacttcctgaagtttcaaataaagaaccggcgattgaagtaataccagtaatagaggagactaaaccagattctgttgaagatgaattaccccttgaatcagaaattaaaaccacaactgatgaacaagcaatgtttgaaattatgagtgaaacggcattatttgatacacaattacataaaataacacaatcaatgttaagaacaattaatttatttttcaatggatcatctagagaagttttggttcatggtttctattcaccttcggataatgctctaactaatattgataatttaaaggatggtgttattataagtggtataattgatgatattactattgcaagtaattcagaaaatgcatttgaagctttttctaaagagttgaagaaagaattagatggtgtatatgatttagatattgtgttccagaaaattgaagagaaggttgattattggactgataaaaattttaaggattctttactatacctagttatcaatgatgataaaacaactgcacgtgggaatgtaccgaatgcacagacaagatgtaatcatttgacacaagttggtatttatggaatgttattaacaaatttagttaaaaatttgaattttacatataattcatggttagagaatttaatttcaagaggagaaaatgttaatgaaccattaaataatgatatggtatcattttgttcaattttaagtgattatctcctgaatgatttcctcaaattgaaaaatggtgaaagtttttcttttgaaaaaaataagatatcccatacaagttcaataactgaagaacgttataaatttactaataaatcaaattctaaaaaattggacattttaaatggtgagtgggtgaattcacctacactatcacatattataatgagattagcacagtctcaaatgttattaaaacctttaatttataataagactcaaataacttatatttcacaactaactcatgaacaagttaaagttattgaaaatacttataattccaaagaaattaaaaatcaagttgatttaggaatggatttatggtttggtaaaagagatcctgaacctacaaataatgaaagaatttgtaattattgtatgttcaataaaaaatgtcaaatacccaaaaaacgtttaggtttattataatagtttttcacatgttgcttaattaaaagtacataatgtttatatagatgaattatagaaaaataacaattagtgtgtaaattaatagataattaactaaaacaaaagaaatagattaatcaaaaattataattaaaaaatttgaaagattggaacgagtttttcaaaatattttatttggaacatataaaatttgataaattaatttcaattgaagttggaacatagctaaaaatctgaattaatttgacgttgttgaattaaaataaaagaacatttattgataaacgaatgaaaaaaatggtaaaaaaaacttggccttcccttcttctctctgatttttcccctatgaaaaatagaaataagtttaataacaaagatacccttctcaaaagtatcagtgtttaatagtaaattgtaaatataattgtaatatggtaagaaaaaaaataattgattgattgattcaataagaataagaatcactcttataacatcataactaatgcaaagacaccaagaacaccacctgcaatatttgatcttgcagctgcaccgttataaacggaaacaatgttttgttcagcaccttcagaagttgaagcagatgcagtagcagttggggtaacagttggaacagctggagtaccggtaactgaaacaaaatcggtaatagtaacaacagtcttgaaaacagaatcactactagtaccggtaagagttttttcaactttaccgctgataactggacaagtagtattgatgatagtaacagtagtaccaatagtaacggtttgattaactgaagcaacagtctttgcatttggaacatcaacagcaactggacaataagtagtgtatgaggtaacaacttcattaacggtagcaacaataacaccaccaacagctgtaacttcatgttctgaacatttgttatctgaacaagaggtaatagttttagtaatagttgaaccaataacaactgtttcaccatctgataaaacgacagtttcaccattagttgcagtggaagaagcaccagatggaacagaggtaatagaacctgaagcagataaatcatcagatgatgaagtaattgattcagtagatgatgcagatgatgcagtagttgattcagtagttgattcagtagttgattcagcagatgatgcagtagaggcagaagatgatgaagtagttgcagatgtagcagcctttgaagcggttgcttctaaactaatagttaagacatctctcttaacaatagcaccagctgggataacatctaattctaaaacaaagttaccaacaaaaacagtcaacaccatcttgatgagtaccagtaattgaaatttttaataaaggatcttcagttctaccatcaaattctaaaccattttcagaagatgaataaataccgactgggttaacaaagttatcaatatcaccagtataaagaacaaatgaatcaacgttaaatgaaccacccgtgacagattcaagaattaaatctaaaccagctaaattgtaaactgattgtggaacatagacatcaaatgtaatatcagaatcaccataaataccaatagcagttggaactgaatattgatttgatggaacaccagtataagcagcaccataaactgaaacaattgaagtttgagtttcaattctagtttcacaagttgaagatgaatttgcaaatcttttttcaagattgaaagcagaagcagttgaggcaattgaggcaagacctacaagagcctttgctaagaaattatttaacataaccatagtttgagataggggaaaaaccagagaaaggcgggatgtcaaaaagaagcaatatacagtaaagaataacaataatgataaaaaatgtgcgaaacccttccttttatagaggaagagtgggaagagcggaagaagaagaaaaagaagaacaataagcgaatatctgcagatttttgattttaaactttctctttgtttattattccgagtctttattttattattataggtaaaaatggctggttataattatatatgtcactatcatagacaatcccacagattatcaaaatgaataatgctctctttcctgcaataagttacggagctcaaccaaataataattttgattaactacagtacaaagaaatatttttttatctcccaatgtggcttaattaaaagtacataatgtttatataaatgaaaattcttaaacaaaaaggtatgaaaacataagttattaacttcaaacaattaaattagaaatttaatttaattgaagctggaacaaagttaaaaatttaaatgaaatcatacgaatggaataaccatttattggataaacgaatgaataaaatgtttttttcgtttttttttgtttgataaataataacctttccctccctctctctaatttttcccctatgaaaattagaaattgatttaattattattgaaatagtatgcgttaaacaaacagtgataaagtgaatgaataatctaatgaatcaaattataaagatcaaccttataacatcatcattaaagcaacgaaaccgacgataccacctgcaatattagatcttgcagcttcaccattatagattgaaactagtgtttcctgatcctgatccagatccagatcctggttgtgaacttgagtctgaacctgaacctgacttgaacctgtacctgtagcagcctggagcagctggagcacctggaccattaacaactggagtagttggagctggtgctggaactggtagtagcatatacagaaacaaagtcaggtaacggtaacaacagtactgtatgaagaaccttggtaagaaccagtaatagttgtttcaacttgaccattgacaattggacaatcagtattaatgacaacaatggtacctgcaatatagatagttttatcaattgaaccaacagttgcaagtggacagtaagtggtgtaagtggtgtgaagatcaacaataactgaaccaacagcagtaatttcgtgttctgaacatttgttatctgaacatgaagtaatagttttagtaatagttgaaccaataacaacggtttcaccatctggtaaaacaacagtttcaccttcagtagcagtggaagaagtaccagtaattgaaacagaagtaatagtacctgaaacagatgagtcagtaccggtagttgattcggcaccagtaatagaaacagaagtattttcagctgaaacagatgagtcagtatcagtagttgaagcagtaccagtagtagatgcagtaccagtagtagactcagtaccagttgttgattcagtacctgtagtagaaacagaagtattttcagctgaaacagatgagtcagtatcagtagttgaagcagtaccagtagtagatgcagtaccagtagtagactcagtacctgtagtagaaacagaagtattttcagctgaaacagatgagtcagtaccagtagttgaagtagtaccagttgtagattcggagccagaagtagtaccagtagttgattcagtacctgaagcagtagttgaagtagtaccagtggttgaaccagtagaagttgttgaatcagtagttgaagtagtaccagtggttgaaccagtagaagttgttgaatcagtagttgaatcagtagttgaagcagtagttgaagcagtagttgaagcagtagttgaagcagtagttgaagcagtagttgaagcagttgttgaagaagttgttggaacagttgatggagcagcagcaatagttgcagttgcttgtaagttaaaagttataatttctctcttaacaagagcaccagatgggacaacatctaattctaataagaaactagcaatgaaaacttcagcatcttcatcttgagtaccagtaactgaaattcttaataaaggatctaaagttctaccttcaaaagttaaaccatcttcactagttgaataaatatcacctgctctaataaaattacccatatcaccagtataaagaacaaatgaagatgcatcaaatgaaccaccaacagctgattcaagaattaaatctaaacctgctaaatcgtattgattttgaggaacataaacatcaaatgtaagttcagttgactctggtgtaaaagcaccttgagcagctggtacagtaaattgatttgatggaacaccagtataagcagaaccataaactgcgaaaactgaagttgaggtttcagtaacagttaaacatgaagttgaattatcatatcttttttcaaagttgaaagcagatgctgtagatgcaattgatacaagaccaacagctgcctttgccaagaagttgtttaacataaccattatatgagataggggaaaatcaaagaaaggcggggtgatgaaagagtgaaaggaaaaaaaataaggaaaaaggtagaatagatgtaaagttgaacaacacctacaaagtcaaaaaagaagggaaaaggtccttttttatagacaaacatgtggagagatagagtaatcaccatgttaaaagaaatagaacacggtaaaaaagtacgatcaaacgattcattgcattaaaatgacaattatttcaagacaatgaaaaaaaaaaattgagcaatgtaccgtttctattacccagttaggaaaattagcaatcttcaatttatgactttattcgtttatttaaatttaaattatttattaataatattaaattacaaagctattactatcactatctactgaaaatatcatcttcatactcctcagcatcatcctcaaatccttcatcatcgtaaccttcatctgaatcgtaatctgaactatcaccatcttcattattttctgaattatcattacctgatgatgaactttcatagaaaacatcatcatcacttaattcatctaatgataaattctttaatgtttcaccctttatattaacattcttaccaaccgtatatgaaccttcaacattacaattaattaaacgactcttaagttctattttaacatttttaccaataatacaattctctaattgcacttcatcgtcaattttagcaccatctaaaataacacttgctgaaatacgacattttttaccaattttaacatttttaccaataacacttctcttaactgttgtacgttcccctaattcacattcctctccaattatacaatcagctccaatatttgcaagacttttattattaactgtatgattactattattattattattattattgttgttgttgttgttcttcgcttgttcctttaaatataatctattaatttccatatatgcaggtaaattattaactctaacaaataatgaatttttaggtaatgcaaataatccaattgttgatttactaattgaatgtttccaagaatttctagctaaatctcttttaattttattaatatttctattacattcaatacctttattatcctcaatatttctacatttaccattcatgaaaaatataaatgaatctaataatttagttgaaactaatgtacttggatatctccataataattgtgtacgaatttttaaaaatttatcaatcataacaaaatcttttgaatacatatcaagtaaaaccatattaccatttgattgatctgaataaactgtataatttgtttttaaaacttttttatcaattgtttcaaatgaattatcatagaaaacacttaatccaacattttcatcactgttacctctataaacttcaattaaaacttgtggtggtaaatcagttataaaatcacatggtaaaataacataattttcattctcatttccattaattgggaaaatttcatttaatattgaaccagttgattttaattctgatgtaaataatttaattggactagaatttcgtaattcattatctctattattatcataatttttaacaaattcttcaataaatttttcatcctttgatgatgtaattatattaactgttttaaatggtgccttgatcacaccatttaagtacatattcaattaatggtttattagcaactggtattaaagcttttggaattcttgaatcacctggtgttgttaaaggtgaaagattatgaccttcaccacaaaagatgacagcattaaattccattgtagttagtgttaactatttaatgctataccgctgtatgatgatgtgtataatttattttcaaatcattaacattctaaatggatgaatccgtcaaatttttttacttaattcagagactgtgagtaagtgagtaagtcaatgattacgtaaggtttggatggttgaaatttgcatttttccattactttcaccatttggcgattttattgtaatttcttaatcttttcggtggcaaatcagtatacttactgttgggtaatttatcgtaaattaagtgacaatgagtgaagaacacgatccattattagccgatcttgaaggagatgactctaatgaaaacaataataatcaagtagatgctgatggggatataatacccgttgaatctaatgttaataatgcaaatgacactaatacaaacacagaaatggatgtagaggtagaagatgtaccagaggaagaggaacatatagatcctgcagagaaggaacgtcaggatgcactcaatgcattaaagaataaattagttgaacatttacattatgaaactaaattaaaggaaatgagaaaaagtttaataagtttagataaagattttaataaaactgaagatgatataaaggcattacaatcaattggacaaataattggtgaagttttaaaacaattggatgaagaaagatttattgttaaagcatcatcaggtccacgttatattgtcggatgtcgttcaacaattaataggaaaaaattaattaaaggtgttagagttgcattagatgttacaactttaacaattatgcgtatattaccacgtgaggttgatccatcagtttataatatgacaacttttgaacctggtgaaatttcatttacaaatattggtggtttaactgaacaagttagagaattaagagaagttattgaattaccattaaaaaatcctgaattatttcaaagagttggtattaaacaaccaaagggtgttttactttatggaccaccaggtactggtaaaactttattagctaaggcagcagctgcaacaattggagcaaattttatattttcacctgcaagtgcaattgttgataaatatattggtgaatctgctagattagttagagaaatgtttagttatgctaaggaacatgaaccatgtattatatttatggatgaaattgatgcaattggtggtagaagatttagtgaaggtacatcagcagatcgtgaaattcaaagaactttaatggaattattaaatcaaatggatggatttgattcattaggacaaactaaagttattatggcaactaatagacctgatacattagatcctgcattattaagacctggtagattagatagaaaaattgaaattccattaccaaatgagagtggacgtttagaaatttttaaaattcatatttctaaagttcaaaagcaaggagaaattgattttgaaccattagttaaaatgagtgatggatttaatggtgcagatattagaaatgttataactgaggcaggatttttcgcaattagagaagatagagattatataattcaaggtgatttattaaaagctgttagaaaaatggttgaaaataagaaacttgaaggtaaacttgattatgagaagttataattgtaataaattgtataataaaaagtttagtttactaatttataattttttttaatgataataattcttatatacacggactatattattaaatttaaaaaaaaaagaatctatatatggatgtaaatctatcttaattaaatatgaagatttttagttctctttaatttatattttgcttcaacgaaagatttaattttattcaattgttgattttcttttattttttcatcatataatttcttttgcttttcaataaataaatcttttggatctttataatcagaagaatttttattaataaatttagctaaatgaggatcagtaatattatttaaaaattgagatactttatcaccaactaaattaattgtttcaggtaaaggttttgaaggtaaattttctttaatttgttgtctctctaatatacctgcttttttattatcagataataaaggttttggaggtaccaatcttttaatatcacttttagttaaatattgtttatcccatttataaggtcttttcattaaaggatgtctcattgaatttattaaatcaattggagaatctgaataaattattgaatttgggaaaaaagttctttcattaactaaatttttattagttgaataaatacaatcatcaacaggatcaggtcttggccaaggaattataatattttcattatatttaattcttctataaggcatcattttttgataatcatcatcccaatattcacctttgaaaactaatttatcagcagcaattttcttttcagtaccatcatcattaacaattgtaccaacaacttttaaatcttttggatgttgaggtaatggataatcaattatatgagaagtttgaccaggttgccaaaattgttttggtacaacaactctctttgtttcactttgttcaaggaaaactctattagtttccttttgtaatgcaacaactttagttaaagtaccagcaaatttccccttagtaatcataacagtatcaccaggttgaactaaccattgtcttggattattataacgttcattttcatcaacttgacgatattctgaacggaatgcaggaatttgagctctttcttgcatttgatcaaacatttttctaatataatgaggataacgagaaagttccctaccataacgtttggaaccttgtttagctaatgaagacatggtttgtattggggtattctgattaaaaggatattctttaaatatacctctatactataatatatattactactaagtctattgaattattatcatgtcgagaaaattcaaatttgaaaaattttggatttgcccaaatagcaaatattatagaggaaaggcatcacaattttagtgtcgcgtcgaaaggtcggtgtgcaatgtatattacgtaatattcaaatttaaaggaggctcatgtgatttttattttaatttaagataataaataagggagtgtccccttttgatagagtttaattaattaattatagttgtttattagttgtttattaattgtttattgatatatatatctttatttcgttttctcttattagttaattaccttccacaacaaaaatggctaccgcttcatatagtaaacttcattttactgctattgatcatttaaattcttatcctgcaattgatgaaattaaatcatttatcttatcttggagtgtttcctctttaatatttaattcaattttaacttatattaaaaattcactttcattcctttctcaatatgaaattttcatctcttattggaattatttagatagtttattaaattcaactttatcattaattgattcaagattatcatttattaaaaatttctcatttatttcaacttataaatcattaattaaattatttaatgataatttaaattcattattaaatgtaacaagacaaccttttaataattttattaaatattttgatccaattttaaaaatttcaaatgattattatgaatctttacttaatttaattttcccaacaagtgcattcacagattttaaaacaaaattgaaaaatattactaatgaacaaaatcaatttcaaagattattaaatttattagatgaaacttttaatagaattaatttaactgcaacaacagtttctaaaattccttcacatgtttcaaatgtttatcaaaatgaattaaaggaaactaaatcaacaactcaagcagtttcaaaaacaactagaaaattatcaaatgatgctttccaaacgattaaaccaacttttgaaaaagtttcaaaagctgttaatttaacaaataataatattaataataatattgataaagttactgaacctttaattgaaattaaggataatattcaaaatgaaatttctaatgttacaggtgttgaagttcattaattatgttaaatcttcttaccttatcttctacatcaatttccatacctttatttttttcttattctcttatataattttcatttcattggtttattcatttctacttttacttattcctctactcctctttacttctctctattctattctattctaccatatcctattctcttttacttcttctttatattgtatatcccgctggttacaacacttaaatacatcttataactataactatatgactatgacgtaatgttatattaatacgcggtgtttcactctttccagaacccttattgctatttttacattcaccaggttttctgactcttcttgctctctctctttataagccttctgttatctcttcatgtttatcttagggacttgatttgttgtattctctatccgtttccttaatcttgattaccgtgtcttttatttcctgatcagtttctgataatgtaaatatatatatataatatatattttcatatctcgatctaaattttgatctaatttatttttttcgtttcttttctcagttttcctttcttttacataagctgatgtgtgattcaataaacatcaacaataatgttgagaatttaaacttcatagatttcgatactaataaaattaatgaaataaataatatcttacatgataaggaaagtttcaataaaaattgtaataatgaaagttttagaattgatttaattaattatattgaatcattaaatactaataatttaaaatcaattgaaataattaattataaaactttgaaaaatcaagcttttaaaaattctcttaatgaaattggtaaagttataacttccgttgcaattggtgatttatcaaatagagttaaaattaatgataatgataatttaaatgattctgaaatttttaaagttaaaaaaacaattaattttatgattgatcaattagataattttacaaatggtgttaataaattatcaaatcaagttgcaaatggtaaattaggtggtagtgttgaatataaagatgcaaaaggtgtttggaatgatttaattttaaatgttaatgcaatggcaaataatttaactaatcaagttagagaaatttcaattgtaacttcagctgttgcaaatggtgatttaagtcaaaaaattaaagttgaagctcaaggtgaaatttttcaattacaaaatacaattaatacaatggttgatcaattaagaacttttgcatttgaagttacaagagttgctagagaaactggtgttgaaggtagattaggtggtcaagctcaaattcaaaatgtttctggtatttgggaagaattaactgataatgttaatgcaatggcattaaatttaacaactcaagttagaaatattgcaaatgttacaactgctgttgcaaatggtgatttatcaactaaagttacagcagattgtaaaggtgaaattttagaattaaaaaatacaattaatggtatggttgatagattaagaactttcgttgaagaagttagaactttagcaacagaagttggtacaaaaggtattttaggtggtcaagcaaatgtaactgatgttgaaggtgcttggaaagatgttacacaaaaagttaatataatggcaaataatttaacaaatcaagttagatcaattgcaactgttacaactgctgttgctcatggtgatttaagtcaaaaaatttcagttgaagctcaaggtgaaattttacaattaaaaaatacaattaataaaatggtggattctttacaagttttcgcaattgaagttactaaagttgcaaaagaagttggtattgatggtaaattaggtgttcaagctgaagttaatgatgttgaaggtttatggaaagaaattacaactaatgttaatacaatggcatcaaatttaacttctcaagttagagcatttgcacaaattactgcagctgcaactgatggtgattttacaagatttataactgttgaagcaagtggtgaaatggatgcacttaaaactaaaattaatcaaatggttttaactttaagagaatcaattcaaagaaatacagctgcaagagaagctgcagaattagcaaataaaacaaaatctgaatttttagcaaatacttcacatgaaattagaactccaatgaatggtataattggtatgactcaattaactttagaaactgatttaactcaatatcaaagagaaatgttatcaattgttcataatttagctaattctttattaacaattattgatgatattttagatatttctaaaattgaagcaaatagaatgacaattgaacaaattgaattttctttaagaacaactattttcggtgctttgaaaactttaagtgttaaatcaattgaaaaacaattggatttaatttatgaagttgataattcatgtcctgattatttaattggtgattcttttagattaaaacaagttattttaaatttaattggtaatgcaattaaatttacaagtaagggtaaaattattgtatctacaaaaaaaattgaagatattgatgataaaattaaattacaattttgtgtatctgatacagggatcggtatcccaaaggataaattagatttaattttccataatttttgtcaagctgatggttcaacaactagaaagtttggtggtacaggtttaggtttatcaatttctaaacaattaattcatcttatgggaggtgaaatttgggttacatctgaatatggtaaaggatctaaattttattttacaattttattatcatctgttaaattatcaattgataaacaattggacattttaagaccttttagatctcaaaaaattttaattgctgcaactgatataatcgaaaatactaattttaatgaattaattaataatttaaaggcattgaaattagatcctcattatattaaagttgatgaaactgctacaacattaaatattaaagatgctgaaagttttgatacaatcattattgattcattacaaaccggttataaattaagattattacctgatattaaatatattccattagttctgctacatccaagattaccacaattaaatatgagagtttgtttagatttgggtattacatcatatggtaatataccgtgttcgataactgatctaggttctgttttattacctgcattagaatctaaagttgtctcacctgatagtgatggaactacatcttataaaattttattagctgaagataatttagttaatcaaaaattagctgtaaagattttagaaaaacatggacatagagttattgttgttgaaaatggtcaagaagcagttgatgcaatacaatcagatacttatgatgttgttttaatggatgttcaaatgcccgtaatgggaggatttgaagcaactaaattaattagagaatgggaaaagaaaaaatatgcagatgctgcaatttgtttcaaaactccaattattgcattaacagctcatgcgatgttaggtgatagagaacgttgtttaagagctcaaatggatgaatatttatcaaaacctttaaagccaagtttacttttacaaacaatttccaaatgtattcataatatgaatcaattaagagaaattagtatgttaggtgaaagtagagattctgataatggtaaatttaaacaatatttaaatgaagaatttctaaaacgtggtgcaagtagtgaaagtgtcaatgcatctgcaaaacgacattccagttaattatttttaaactatttatccaattatattatatacctttgtaatcttttgtcttttttctacgtcatgataagtcaaatccagctttactattaatagaatacaacaatttattcctgagtaattctttatctttataatctggaagcttcaataagttaacacacgtaccagctgtaggtaatctttgacaatcctcacctgctctattaataccgaatttcggattaagttcagaaaatcctaataatggttgctttggagatgatgtaacaaattttatgaatttagccttattatcattatcaaactccctgagaacttggaagagatcaataatagtttgactattctctgaataccctccaccatatatgacattcttttctaaatcatcaatatcaatatcttcatcatcaccagaaattaaagtttgtaattcaaatggactgaagattgaaagccaaaatggatcaataacctgaaaaagaccatctataaatgcgtcagaaataactttaaactgtttggatagtctaaaagctgtgactaatcttataaaattcaatttattgctattcgtaaccggaactggtgctggttccaatcctggttctttaggaactaatggtagtaatggaatttcaacatgtcttttttgtaaattcatatcatagaaatcatcatcaattaaaaattctaatgacatttgttcaaatttagaatcatcagtctgttttaaggacataatttaaactattgtacaatgattcatctaaatttttcaactcatcaaatgaatttgaaaaatcatccttagcgtcatcatctccagtggaactacagcataatttgaggaaaaatgagcagaatgaaatatcaagcaatacattatcgtataaacattttcctataatcatacccaaaaatctcatcatattcaaatattccgtatctgagacagcatattcaatttcttcttctggatgttctctttgatacattattttgaaaaataactcaggatttgggtataacttatgatgtgttccttctttgaaaaactgtaatcccttgttcatctttctattttcaagtgatggaataaatgtagatgtcgttaatgcagtcaaaagctccttggtaagtccaccaccatcaattcctgcttcaacttcaccaaactgattgatgaattgaacagaaaatggtaacttgatatctcgtccttttaaatttccaaaatacttatatgaatcaaataaaacattatctcttgaaactataccttctggtttctcgggataccattcgtttaaatcattatccagtttatcaatatttagaagttcatggaacattgccgctcttgtctcaaatggaatcatatatggagcatatctcaagatgtaaaaagattctaacattttgttaggaagaagctgtctaacagatgcggggatgtattcgaataattctacggaactagtcttcatggtatcctgcatagctttaattgctccctgcatgggtttcattaatcttaataaattaatcataaaattttcatctagatccataacttgtaataaccagaatgatctatcgcccataaaattcattttcatatccttaagatataatttcttagtcaatagtagaacctttttaaatatcttcatgactattggggcattcagttcagccatcttagaagttttcttattatatagcatatcagtaacaaaaaatttcaaaaatttagtaaaattgatcaaatcatctttagagattagtattgatgtatagaatgcttcatcagaagataatgaaagcattgacaacataaattcggaaaaaacttctagagaaattaaccaatggcaattatcatcatcttcaaatgatgatttattattctcaatcaaaatactattcaaacttttaaactcttcaaactctgataaatatttaaaactatccttcataatttcagaattttgctcagaaatgatccaatttaaatcagtgagagatttcaatacatttgcttctttcctttcaaatgtgcttgcaaatattaacaaaaaacaaacatgatttattaaaatgggagtttctttacttttaaacttagtccaatcataaatctttttgtattgataaaaaaatttaaagctttcaaatacctgattgctaattattatttcatcttctgcttctttgacccaaagatcttgtgtgttagacactttagtcgtccgattacttacacttaaggtataacgaaatgtaatagcataagtgactgcgattgcttgaatataataatttctttcatactttgagaacctttgaacggcatctgctgcaaagcataataggggaattgatgtagttagattttcagacaaaaagtaatagctgatttggaaaaaaaacttttgaaattcatattctaattttttgttaattgcatcttcggtaatatttcttttaggtgcatacacaccatcttcggttttaaatagtatattaaataacaaattggtttcaaaattatctgctcccttcaaaataaagtcaaaaacctgaatatcagattcctcaaaatataagtagaaaagaacgtctagaaactttttattatttatctttctattcccgaaaaacaaagaggaaattacatccaaaatgtcattttttatttcatgaaattcagctgtgaaataggcttcattcttcgtataaacaaacctttcaattaattctaaaaatcctgaaatcaatgcctctctagctccaatctcatcatcttcaaaaacgtaaacgcctggcaaattatacatgaaatcttcaatttccgccagtgaacatcttttaatgaattcgggaaagaaaaatttgaattgataagtatttttcttatcccattctttggccatttgaagtttagtatcccttaaatcaatataacgacgaatggcagattgtataaccactgcagcattataagtttttctctcagcttctcttttttctctctccagttttgcctttagtaaaaaattattcttatcacccaaagatctgttccctaaattaacgttctttcgtttcgttgaacccgtaaaattgaaactcatacctttgccagaaagaagagattcgggaggtaaatttgataagattcaaattcaagagatacaacagaattaagtaatcatgttgagtggcgcagtgtttttgcttattgtggcgcatgaaacaccaagttaaaatttttactgtgtgcaacgcgtcctcattttagaaatgacgaaatttaatgattttgaaatttttattaccaattgattgatttgattagcttggtttatttttatatataagaacaattagacaatgactgttaaaagagagggaggagaagaattggaaattgatatctatgagttagaaaataaaagaagatgtctgagtaataatgaagtgacaaaggaaggatttgtcattccaattcataataatgaagttaatactgaaacaattgataaaaagcttaacacacaggaatctcaagtagaatcatcaagttttgaaaaagaacttcttactatgactaatgaaacaaaagaatttagaaatccagtacaaatttggggtagacctgaattaccaaaaaatttcaatattgcaacacatgatattaatttccaacaattagatgcagaggaatcaagtttaatatcaggtggtaaggaggaaggttgtgctagattttttggtataactgataatgggaattctgttctttgtaatgttaccggatttagtcattatttttatgtccctgctccaaaaggtttcccaactgaatttagtgaatttactaaatatttaagaggttattatcctaatatgattgaagatgttgaaattgaaatgaaattaagtatttgggaatatcatggtgatcaaaaattaccatttttaaaaattattgtaacacatccaaaacatgcaggtaaaattcgtacaggatttgaaagaggtgaagttcaatttcgtgaactatttaatccaagtggtacagttacttttgataatttacaatatttattaagattgatggttgattgtaaaattactggtatgagctggttatcatgtccagctggtaaatatcaaatggttgaagaaagtagaaaagtttctgtttgtcaactggaaataaatataaattatgatgatttaataagtcataaacctgaaggtaaatacttagcaatggcaccattaagagttttatcctttgatattgaatgtgccggtagaaaaggtattttccccgaacctgaacatgatagtgttattcaaattgcaaatgtagtctcaaatgttggtgaaagtattccatttgttcgtaatgttttcactgttaagagttgttctccaattgctggatctgaagttttcagttatgaaactgaggaagaaatgctgatgaaatggaaagaatttatggttaaagttgatgctgatgttattattggttataatattataaattttgatttaccatatttaattaatagggctagaacattaaaattagagaatttcccttattttggtagattattcaatacaaaacaagaaattaaagattcaattttcagttcaagagcatatggtacaagagaatctaaagttattaatactgaaggtagaatgcaattagatttattacaatttattcaaagagaatttaaattaagatcatatacattaaatgctgtttcatcccatttcttaggagaacaaaaagaagatgttccacatacaattattacagatttacagaatggtgatagtgaaacgcgtagaagattggccgtttattgtttaaaggatgcatttttaccattgagattgatggaaaaattaatgtgtttagttaattatactgaaatggcaagagttacaggtgttccattttcatttttattaacaagaggacaacaaattaaagttatttcacaattatttagaaaatgtttggatttagatattgttatacctaatatgaaaagtgaaaatgttaatgaagaatatgagggtgcaacagttattgaaccagttagaggatattatgatgttccaattgctacattagattttgcatcattatatccatcaattatgatggcacataatttatgttatactacattattacgtaaaccaacaattgatagacttggattaaaggaaggtgatgattatatcaagacaccaaatggagattattttgctaaagatcatttacgtaaaggtattttaccaactattttaaaggaacttttatcagctagaaagcaagcaaagaatgatttaaagaaagaaactgatccatttaagaaacaagttttaaatggtagacaattagcattaaagatatcagcaaattcggtttatggttttacaggtgcaactattggcaaattaccatgtttagcaatttcatctagtgttacagcatttggtagagaaatgattgaagcaactaaaaatgcagttgaagaaaaatatagtattaagaatggatttaaatatgattctaaagttatttatggtgatacagattctgttatggttagatttggatttgaagatttagaatcaagtatgaagattggtgaagaggcagcagcatatgtttctgaattatttaaagatccaattaaattagagtttgaaaaagtttattttccatatttattgattaataagaagagatatgctggtttatattggacaaatcctaataaatttgataagatggatactaaaggtattgaaacagttagaagagataattgtaaacttgttcaaaatgttattacaagagttttagaattaattttagaggatagaaatgttgaagaagcagaagaatttgttaagaagacaattgctaatttattacaaaataaagttgatttatcacaattagttatttcaaaacaattaagtagacaagattatgcaaatagacaaccacatgttgaattagctgaaagaatgagaaaaagagatccaggtagtgcaccaaatgttggtgatcgtgttgcatatgttataattaagacacagggtaataagaattatgaaaaatctgaggatccattatatgttttagagaattcattaccaattgatacaaaatattatcttgataatcaattaagtaaaccattaacaagaatttttgaaccaattttaggagagaaaagaacgcgtgatttattacaaggatctcatacacgtattattagtagtaatggtggtaataataatagtaacagtaataataataataataatggaaagggaggtttattaatgagatttgctaaaaaatctaatacatgtcgtggatgtcgtagtgcaattccagcaactgagatgttatgtaatcattgtaaggctagaagtggagaattatatggtgaagcagttgcaaagatggcagttttagaatcaagatttgctagattatggacagaatgtcaaagatgtcaaggttcagttcatcaagaggttctctgtggtaatagagattgtcctatattttacatgcgccaaaaatgtcgtaaggacgtggcgcagcagggagaagaggtggctcagtgggataaaataaaatggtgaaatatttaaaaattcagttacgtaatcagcaaatcgggtgtaaataattacaaatttttgagtgaaaaaaaccattggcgaaaaaaaattaaaagctcgggaacggagaagaaattattaatagtgtgaaaaagaaaaccgttgtgagagactaatttaataatatttttcaagcgttcggagactaacggagactagtggtttatatcagtctgactaattcctaaattctattttaagtttattttattctattttattttatgtttattctatgtttattttcttttatagcatcttataattctatattattcttcagttcaaaatactacccatccacttatgcaaaaatgatttcttcttgcatgcaaacgtataattctggaaaaattgctcaaacttatctcctcgcttcaaaggtaaaaacaaaactaaatcaagaagcagttaaaaataatgttgatctgcatcgtttagtatgtcaagcaaatttacttgataatttaatagaatctttaaatcatttagagaagagtttacaaaataattttatttctccaaattcttcattctcctatgaaacaattaattcaaatacttatccccttttaaatagtctatccctaaatatgaataccctcaccttgatttcagaaaatgaaatagacgataaaaatgatgataatgataatgataatgataatgataatgatattgacattcaagtagatcagatacatctgcaaaatgaaaatccttcaagtgtatattactcatctgacgaatccgatgattcattttcagacgatgatgatgatgatgatgatgatgacaatttcgattcagatgatgaatatatcaataactctccatctgctttattctcaaatgatctttgttcaattgccttacagagactgaatattcaaagtatagaatgtgattctgattctgattctgataatgattctgataatgattcttaccttgatgatgaaacaaatttaaatgctgagtacaatgatcctgataacaataataacactcaaactaatattaccaacacatttgttgacgaatgtgattgtcctttaactagaatgaagtctcagtacatagatcataatcattatgatgaagaaactgaacttcctcttctgtcaaattgcccatctgtatcatccttggaagaatttcaggtagatgattcaacatttactttgactactcttcctaaatcaaaaactactaatttccatattcaaaataatgatgaggatgtttctgaaattttatcattctaatatatcaatatatgttagtaaaggtggctttactgatgtataaattgataccatatactgcttttaattttataatgaccttttacgatcaaaaaaaacacttaacgtttaatgtttatatgaattgattttaattacttctatttttatttttatgatatttacatttatttttactttttcattgtttttagttttttacctatgttttcaagctgttgttattttgtaattaataactgaatataatttttacgacataaattttaaagaatttccgcaaaacacttcagtgttttttaaaccttccgcttccaaaataagaaaaattaacaatgtgaacaaatcaaataaattaaacttttttaagcattaaatgtacatatctaactattggatattttaaaacagctttacaagtcttaataaataagtcaacaaatttagcctttttagaaagtttttttttttttttttacattaatttcattaaaatatacaattttatacagattgattacttatacgcatatattattcatgcttcatcaattcaatatatcttcatatactgaactaaatgtaaattatttctgtttgattattctcaatctttttcatctaatttagatctaataagaactaaatttttcatatttgaatagcaaatatgtatctttaatatatctttttgttatcctaaactctggatcattcttattgcttttgtagcattgtttgttaaaaaatataattaacttgattattatatttgctttataagcatctttctttgttgatattaaaccaacaatattctttagatcaatttttatctctaattcttttagaattatttcaattcctttacagttgaaaaagacatgatgagtcccaccttccccttcgcagaattggcaagggtgataaaaatgggaattcaacattcctgtttgtaattcaaataattcattaaaatcaacatggttttgattggtgattctacccaaccaaccaaagcatgtttcccaatccagttgatggtctagtttgccatcccaataatcagcattaaatttatttttaaattcttctttgtaaaatcttttagaaaagtgtttaaatgattcaacattgatttcctgatttttattgaaaatttctacaattttccatttttgaacatttttttctaccattgaaaataacgatgttgcattgaaatctgtagtttctttaacctgaaaatctgagtgaatattagttaaataataccatccttgtaaatatgggaaaatattagagtacaccattaatggtgctaatgtttttgaagaagcttcatccatgttgtaattcacagggtgttcgataatgaaattgatatttggttcaagatcgattattattttccctgtatttacatttattattttaggttttgcaacctttgacatttcatttgaaagagtttcttcaatagtaatattacttccccatattttatgatttttatgcagaagaagactgaacggatatgttgaaatcaatccatttgaaatagtgcctggtatttttatttttggtaaagttccaggtacagctctatttgatagtatgtaattttcaacatatttgtaataacaatgataaacgtagtgatttctgatcataacattaataattccttgtaatgagtgtgagattattaatgtcaaaggatgttcatttataaattttaacttctgtttaatagtcgttatataaatgaaatatgctcttctaccttgaagttgtttaccaaggtcgatcagacccatacccccatttttgtgaggttgatgccatttgattcttctaactgcaattttcagcggtaaatatttaactaattcttttttaacataattttcaaaagaatttaaaagaggatccggaattggatcatgttgatcaaaataacagatagtggaataaatgtaagtattaacagctactactctttgatataaatttagatctaaaaacatagttttccttagtcttgttttcaattggtttattttattgtaccagttaattttcaacaagggaattcctagatagataggattttctttgatatctaaaattgatagcttcaattgatttatattagcaaattgtttgatattattgatacctttattattaataaaaattattgatttcttttcatttattttaagatccgaaatttgagcaaaattatttaaaattgatagcgattttaatagttcattattgttctggtgaaacagacatatatcatcagcaaaagctagaatattgataaaaagcttagcatttaaacctctctcattgtatggattgtatttcattcctctaattgattgatggagtttaataatcagtggttgtattgcaagattgaatatcaggggtgagaaaggtaaaccttgtcttacacctctccttaatggaatattaaatttatggatccaattttgattaactatattagccgatgctaacctagattggttaatagttgcttcaatagttgaattagggaacccaaatttttctaagatctttttaagatattgatgatcaatagaatcgaaagcttttttcaagtctactaataatatatgttgttcattggataatgatggtgatgaattgatttgattagcaagaatccttgcagtttcaatatgtaaatgaatatttctgtgaagcataaatgcttgttgatgatgggaaataatcctgtttgcaataggcattattctattagaaatagaaaagttgattaatctaagtgatgaatttgtaagactgataggacgtagatcatctattaatggaagatcttgtcggtaactctttttgggaattaattttatcaatactttaccaatcttatcagttgtggttaaattgccttgaagaatataatttgccatgttggttagaatcacagcagcagaaacccagttgtttttccaatctctgtaagtaataccatcagtccctggtgatgatggaccattttcatttagccttagaaggtttttatatatctcttgttttgaaaaaggtttaattaaatcatttttctctttctcagttaattgttctttaatattttcagtgaacttgtcaaatttgttatttaaattttgatttgaataaatttcatttgatgcgaaaagatttgaataaaatgaatttgcatcatttataatattttcatccaaatttgcttcatttgaatgttttccaaatctaagtctaagtctcttgaagttttttgagagattagctgagatattattgaattgaggatcattaaaatcaaatcctaattctttagatgatattttttccttatatgaaggtaaatgtttcattatctgaattactttatttgttttccagcaaactctttgcatatatgcattataatccattgatgggtttttagtatccagaatctcattggtgaaaatgtatttatataattgtttattttcaataatgtaatcaggaattgatggtattcttttgtaaaaattatctttattaattatattattattagaatttgaattgatatctgataatgtacatactaccggtctatgtgttgtaaacggtagcttttgatgtactctatatttaaaattgatatttcttagcagattgaaggaaacatggaaacggtctagccgattatttgttccatttgaaccgtggttggtgtaacgtatacttcttctattatttggaaggaagaaaatatcatataaattattttccattaattgttgatgaagaaatgattcaatacgatttaaatttgttgcttccataggatgtgtattccaatcaccacaaatgattagattattttcaccacgagataatgatgataaagttggacataatgtgtcaataaaatcttttttgttaatgcagtggaatctgttatcattaacattattgtaaactggtacataaacagagatgatagttaagttttcttgtttgaaatttattgttatatcacagacataaaagtttgcaagttgattatcacgattatgccttgcgtgacccttttacatgcatgttgttaatcactataaaaataaaataatgatcctatcccatcatttttcataaccgttgattttctgtcaacattggtttattaaattattcatcatatttcttcattaaatcttatttcatttaatctcttgtaatatgaagcttattagtgatataaagtgaatatctatattataatcaatagagacattacaagtggtatagtctgaaggatagactttaataataataataatcaaagagattaaatgaaataagatttaatgaagaaatatgatgaataatttaataaaccaatgttgacagaaaatcaacggttatgaaaaatgatgggataggatcattaattaatttattatatacaacttctccactaattgatttagtcacattatattacaactaagaactgaataatagattccccacatggagaatcgggctggcttgtgagataattaattacagttctttaaagtatataaataacatgtataagctctcttgagcgggacatctcaatatatgagagttggttgtgataacttatggtctaactttatcttaactaactactcgcataccagttccaccgacagtattcgcatagtagtattaagtacaattagttacagttataattctttattgtattgaaaagattcaacataagtattaattatttgattacgtaatattttacgtacactatctacaatatcctcctaatactttacatggtagcacctttaggtcaatacaattgaagaatatttttaaaaaaaatttctacaagtacaatggttagagcaagaaaaaatattcatcaaactgaaactccaacagttgaaccatctgaggaaccagttgtttcagattttccagaagttaaaatgattccatataatcatattaataagttctatggtaatccaaatgaacatgatgagttcgttgatgcagcaaaactcaaacaaatggcacgagaatggttgtcaacattcaaagaagttatgattatgaatagaattccaactgatttcagaattcactatataagaataggccttagaggatctgctcatttatggttatcaagtatagattctgaagataatagcttaagctggaacgaatttcaaaaattatttaataaagaatattgtaatacttcaattgcaaatagacaaaataattattctatatgtcaattacaattttcttctgatgatactgttcctaaatttaatgctgaatttgaaagattgttgttgaacagagaaactccattaaaaccagactttgtcatggatttatatttaataaaactaccgtcctacatcagaaaacaaattgaaaatgcaccatattcaaattatcatgaacttaaacaagccgctgagcgtgttgaaaaaacttcaaacttcaaacaatctcatttcaaacaaaatccacatttaaattctaataattattatcacaatcgtgaatatactgctgaaaattatcaagaagatagttcccatgataacaatcatcaaaaggtcagaagacttaatgatcaagaatgaaaattcttaaccggttaaaatcctatattcagaggcaaattaaaataattatgctaatttaataacttgaatcatgattaatatgcttattataaattataatttttttttctagctaaggctaaggcatacattaacagattgatatcctataattttccattgctttgtgaaataaatgaaaccattagagagatttaagatttttatcttttggaaattgttttaaaaactcatcgtgataaactttcaatagaagaattaataggaactgcagagcaacgtgcatccgcatcttccgaagtaagtataattcaatttagacacgatgaagggtatattataacctttactaacctcaaatatgattacctctttggtcaattcactgcaatgagaattcaaatctaactttgaatttagacttactcaactatattaatctggtacataccaccataccaaggctgataaaaaggctaaaaggcaaatagttgaagatcatgataagaaattgccattcaatccctgaattagagacatatgaaaaatttattgtatgttaatttacgatcaatattattctttgatgatgttaaaaatgatacctactgatttacttctagaaagaagatatactcataaaatccaattattaattaatatactttattgggatttagtttaaattaatttaacaaatgttattacagtagaggagttagagtttataatttaaggaaattagaagaaagtataatacttcatatatgactgagaatttacggctcttatatctcttacatggaaatattactaagatcttattgaattaataaataaattttgaattaatattatcaaattacaacaattatatcacaaagtgaacatcgagacgatgtttcccgagacgggaggatgtaagtaatatgaagcttattagtgatataaagtgaatatctatattataatcaatagagacattacaagtggtatagtctgaaggatagactttaataataataataatcaaagagattaaatgaaataagatttaatgaagaaatatgatgaataatttaataaaccaatgttgacagaaaatcaacggttatgaaaaatgatgggataggatcattaattaatttattatatacaacttctccactaattgatttagtcacattatattacaactaagaactgaataatagattccccacatggagaatcgggctggcttgtgagataattaattacagttctttaaagtatataaataacatgtataagctctcttgagcgggacatctcaatatatgagagttggttgtgataacttatggtctaactttatcttaactaactactcgcataccagttccaccgacagtattcgcatagtagtattaagtacaattagttacagttataattctttattgtattgaaaagattcaacataagtattaattatttgattacgtaatattttacgtacactatctacaatatcctcctaatactttacatggtagcacctttaggtcaatacaattgaagaatatttttaaaaaaaatttctacaagtacaatggttagagccagaaaaaatattcatcaaactgaaactccaacagttgaaccatctgaggaaccagttgtctcagactttccagaagttaaaatgattccatataatcatattaataaattctatggtaatccaaatgaacgtgatgagtttgttgatgcagcaaaacttaaacaaactgcacgagaatggttgtcaacattcaaagaaattatgacgatgaataaaattccaatgaatgcaagaattcattatataagaatcggccttaaaggatctgctcacttatggttatcaagtatagattctgaagatgatagtttaaactggaacgaatttcaaaaattatttaataaagaatattgtaatacttcaattgcaaatagacaaaataattattctatatgtcaattacaattttcttctgatgatactgttcctaaatttaatgctgaatttgaaagattgttgttgaacagagaaactccattaaaaccagactttgtcatggatttatatttaataaaactaccgtcttacatcagaaaacaaattgaaaatgcaccatattcaaattatcatgaacttaaacaagccgctgagcgtgttgaaaaaactttgttaagattaggtaatacaatatcctattctgatgaattgaggatatgcctcgctacatggaaatcttgggttcatgacagatattgcttacgtggcaattgatcaatgtctagtggtcggtgaattgaataatggataatagttgatacggcattagtaacgggagtatgagtttagaacacagatatacctagtagaaggtaatggaaggtcttggaatggttgatggtaaatcccgcaagacgtgaatgaatggatggcaaattccagtcgaggagagtgtaacttcatgttactaattttagtaaatgccgtatgaataattggatacagtttactatatgagtgcaagtacaatggagttatactggtgacgtggaattatctagaagctaagtagtagctcggaaaaacggggaaatgctagtaaggaaaggagactgcctgaacgtgtgattatatataactgccctgtgccgccgatagttgacctattggtgaagagagatgtgaacagaatttgttattggattttctacttggagatcgatcggaaatcgaaagatatataatcaaggaaaactaattaacaagttaaccatcgtctaagctgtctcattttatattcaatttattttatattatttatagcgacttaagattacttaattaaaactcaacatggtacttactcactcagagaataacaacaataacaacaacaacaacgatcaaattgaaggctcatcaaatgatgtcaacaatcaagtcgctgaagttaacaattcaactgatattaatgaaaacaagaacactaattcaactaatgaaattaattcaactgattcaactacaaatactgatgcaaattcaaccaatgataaagcaaaaactgatgaaaaagcaacaattgatggtaaagcaaaaactaacgattccaatcaagcatctaatgcaaacaatccaattgtcattgatgataacaatcaaactaatcaatctaatgataagaaatcagtagttgagattatcaatgaaattccaaagaagaaaagaactagaaagccaagaaaagataaagatggtgatgttattatggaagatgctggtgatacttgggcagaaccaactacatccaaggttgataaggtttataaaaattttcttaaaactaatcaaacatttgaaattttgaacaccaaggaagatttcaataagtggtggttcgatattaacactaatttggctagaattggttttattgatattttcaacaggatggttaatgctaaaattgatggtatggagatgactttaccttcaactcaagaaaaagtcattaagaatttactttccagaactgttaagatgggagattttggtaaaaatgtttcttcaaatgctcaaactatgttgtatgatattttatcaggttgtgatttatgtgttgatttacaaacatgtattgccaagcaaaaacaatttagaattgatttgtccaaagatagattacaagctctcaatgaatgggaagaattgtcactttgtatgagattatcaagatacaatccagataatgatactttagttgctcatattttactcaatttttgggatgattatgattgtaaggaaatttcaaaggttattgaaggtatggttcatgcagaaaataatgatattccggtcttaattgataaagttcataaagaatttagatcttttgctggtatcagaaataaagaagctgtgttaaaggaaattaccaaaaataaacaagttgttgctggtattagatccaatgatgatttatcaaataataatcatgttgataatattaacaataatgttggtaataagaaacgtggcactggtaacaatcacaaggtcaataaaagaattaagtcaaagaaaggtagaagcagagttcctaaacattgtgttatatgtggaagaaaccattctgtttacgattgtcctgagaaatttgctgaaggatgctggaaatgtggtagtgatactcataatctaggtaaatgtccggtggtaaatgcagataagaaacgtaaacaggttaatgcaattttaaatgataccgaagctaaagcaattcttgatttaatgatggctgagagacatggaaaaattcatgatagtgatttagaagttgccaggcatcacggctgaatcttttgacacttctattattttggacactggtgctcaggtctccgttacgggggacaaaaacattttagatgatgatgaattaggtaaggttgattttcaaaatgttacatctgttaccaaggatcaattgaatattgaaggtgttggttatattactttaggtttaatggatggtgataagaagaaggttgtttctattccaatgttgtattgtcctaatatcagtggtacatatatcagtgagagggatttgattagatataatgttgattatagatctattggtggtaaaccaaatttggtctggcaagatggcaacgctaggttgtatcgtgttgaaggattaccaatgattccaaaatatttcattttgaagtatcaggatggatgtggtgtttctggtatacacgaggcactaggacatgctgagctagggaccgtgaagagtagtatagacaatggcacagtgaaagttgataaagatgaaagatttcttaacagcaaggatacctgtgtctattgtgcaatagccaaggcatctagatgtaggcattaccgtggtagtagagagaagtacgtggttgaaactccattttatttggttcatagtgatctacttgttctgagtttcaagagtacaaaagatggaagtgttaagggttcagcgttccgttatatagttacctttatatgtgattatagtaagtttaacatttgtttttatttaaatgataagacagaagttgaatccgcttttcgcaaatattgtgcctatattaagaataaatttaaggctgatatctcttacttccatacagacatgggaaatgagtataaaagcaacagtatgaaagactactatgctagtaatggtattactcatataactaccaatggttacgcatctatggagaatggcattgcagaaagattcaatagaaccttgagagatgatatgaggacgaatctacttgaatcgggtattgataatagattttggccgcaggtcatggagtacacttcaatgataagaaacaagatcatacctaaaggaaaggataaatccccggaacagattataatggaacattgttaccctggtactggtaggaaagaatttatacatcatgtgttcaagagttttggtagatatggtatctggttggatgcttcaaagaaggtttcaggtttagaaatgcgtgctcatcactgtttctacctaggtccttcagagtatccatgttcagataaatctcctgttctaggtggtgataaagtcttggtttttgagaaatacaaagacggtctttattatcctactatcaaggacacaagaaatgttaaatatagtacaccagtcaaagtattcaaggatattccattagaaaatttcgggatgaaattgggtaagtcgttgaatcttgaagtggacctcattgacaagtatggcaaggcaattccaggaaaggaatcagaagagatggatattgattatcctgtgttacctaagaattttgtatatgaagtgaataagagtacccttaagaatgaaacacccagggacagtgataggggcatgttggattcgaaagatcatatggtaccacaagaagttcaggttagaggtgctgacattccattgaatatggggggagatagggttaatgttgacgtcagcaaagctgatgaagatacaataccaaaggctcctgaattgatgaatcaagttgattccaagattgataatgttgatattggccaaaccacagatgctatgaagcaggtggtgcaagaagataaagttgacatcccagaatcagttaagagtcaggatgaagatactaacaatcttggaaaagatactaatgaagttactcaagatggaatggtcgatgaaaaagaggatgctggggaagagcctatggatcaggtcaacattgatggaagtatatccaaagaaatgtccagcatcactgaacttgatgatcgagtagacaacgtgacatcacttggcaatgaagattctaggagtcatgaccgtatagatgacattgcagtggaagagataaccaccgaagacttgaagcgcaaagagacgttcgaacgctccatgagggaggatgatatacacaaggcgcttgagttgaatgaaaacaatcttgtggaatatgaagtcgatagaactttgctgaatacgggcaacccgcatgaaaccataaagctacctgaaggaagacttcttcgtagtaggttctcaatgaggtccgtcaacggtattaagatcgttgccaatatcagcaagttaccaagggatgacccgggccctaatcgaatcatataccaagttgtttgtcatgatccagttgaaggaccagcatggagagaagcccatagaactgaagttgaagctcacaaagaacgtggtacttggaatcctaaggccattattactagtgaccctcatattctgcagagaactgtcaacatgcaaactatttgcactgagaagagacctaaagaattggggggagaaactaagaagaaggtgagaatagttctacgtggggataagcaggataagtctacctatgatgatacttacagtccgacgttaccttatgacttgctgagattgattctcgcagaggcagtacaaagcaatagacatattgagatgatagatatatcaacggcttatttgaatgcagatatagaccatgagatttatgtgcaattgcctaaacacatggaagagaaggaatacaagctcaaccatggggaaaaggtggtgcataaagttgaaaaggctatatatggactgaaacaatcaggatatctttggtataacactttggttaaatatttgaaatctgttggttttgaagagaggggagaaattccttgtgttctagtcaaaccacagaagaagaataaatccaagatatctattattgttggcttctttgtcgacgatatgattatttcaggggcatcaaaaaatgaggttgataatttcttgtttaagctggataagaagtttaatttgaagatgactttagttaatagtcagggatttaaggacattcttggtatccatgtcagggaaaacagggataagagaagtggtacattactctcgattgagttaagtctcgaggattatatcactaatcttgtaaagaacttggacatgaaagaagagtttgattcacaacgtcatatttctactccaatgactccaggttttcactttaaccttgatgaagaagaaccaatggaattgtccggtgaagaattagctaaagagattcatttcttccgtgaagtggtaggtgcattgcaatacattgcattgaccgtgagacctgatattacttatgcagctaattatttatccagatattgtctttgtccacaccctaagttgaaaagggaattgttaagagttgtaaggtacttgtatcagactcgtaagtacatgataaggtatactagataccagtctgatttgagtcaggatatggatagactgatcacctattccgacgctgatcatgcgggagacccagtatctcgtaaatcgactttatctgcagtttttatgatgaatggaggtcctgttgcatggtttaccagagtggctaaattcatggcaacttcatcaacggatgccgaggtggcggaaatggtagagagtggaaatggattgacacactaccgtgaagttttgacattcctaggaatattaggtcctgaatattctaggagaaatgaattttatggttcaggatatggcagaattaatgaagataaggatgacctaaaaatggaagaattccgtcgtattagaccattacttgttatggtagataatactgctgcattatacctggcacaaaagggaaagacaagcaccaaatctaagcatatgggtattagggtggcccgtgctagagatattatggaaaatgaacatatacagtataagtatataggtactaaggatatgatagctgatatcttgacaaagcctgtcactgctgaagtaatgaacagtatcttacctaggatgatggtggtgaatcctccaaatgttactcacatttaactgtgtttagcccggtgatggctagtgtcgtgattagctagaaggttcttcacagatacactgaacattggtattttgttatgaccaagttagtttaagagcaatgggtttagaattgatattgtgctttatgatagtcttgacattgaccatgtatgacttatagaaggacatttatgatatatgaaaatggaactaccaaatttgaattgccatgaaaattttgttatataaacgcgagtgtatcgcataattttatttaatttgttatatttgttttatttgttttataatttaattgattttgatgtttacaatttattcatgtcttttctatctggtagtgctcctgtccttaaaagcatttggtggtgtgttaagattaggtaatacaatatcctattctgatgaattgaggatatgcctcgctacatggaaatcttgggttcatgacagatattgcttacgtggcaattgatcaatgtctagtggtcggtgaattgaataatggataatagttgatacggcattagtaacgggagtatgagtttagaacacagatatacctagtagaaggtaatggaaggtcttggaatggttgatggtaaatcccgcaagacgtgaatgaatggatggcaaattccagtcgaggagagtgtaacttcatgttactaattttagtaaatgccgtatgaataattggatacagtttactataggagtgcaagtacaatggagttatactggtgacgtggaattatctagaagctaagtagtagctcggaaaaacggggaaatgctagtaaggaaaggagactgcctgaacgtgtgattatatataactgccctgtgccgccgatagttgacctattggtgaagagagatgtgaacagaatttgttattggattttctacttggagatcgatcggaaatcgaaagatatataatcaaggaaaactaattaacaagttaaccatcgtctaagctgtctcattttatattcaatttattttatattatttatagcgacttaagattacttaattaaaactcaacaaacttcaaacttcaaacaatctcatttcaaacaaaatccacatttaaattctaataattattatcacaatcgtgaatatactgctgaaaattatcaagaagatagttcccatgataacaatcatcaaaaggtcagaagacttaatgatcaagaatgaaaattcttaaccggttaaaatcctatattcagaggcaaattaaaataattatgctaatttaataacttgaatcatgattaatatgcttattataaattataatttttttttttctagctaaggctaaggcatacattaacagattgatatcctataattttccattgctttgtgaaataaatgaaaccattagagagatttaagatttttatcttttggaaattgttttaaaaactcatcgtgataaactttcaatagaagaattaataggaactgcagagcaacgtgcatccgcatcttccgaagtaagtataattcaatttagacacgatgaagggtatactataacctttactaacctcaaatatgattacctctttggtcaattcactgcaatgagaattcaaatctaactttgaatttagacttactcaactatattaatctggtacataccaccataccaaggctgataaaaaggctaaaaggcaaatagttgaagatcatgataagaaattgccattcaatccctgaattagagacatatgaaaaatttattgtatgttaatttacgatcaatattattctttgatgatgttaaaaatgatacctactgatttacttctagaaagaagatatactcataaaatccaattattaattaatatactttattgggatttagtttaaattaatttaacaaatgttattacagtagaggagttagagtttataatttaaggaaattagaagaaagtataatacttcatatatgactgagaatttacggctcttatatctcttacatggaaatattactaagatcctattgaattaataaataaattttgaattaatattatcaaattacaacaattatatcacaaagtgaacatcgagacgatgtttcccgagacgggaggatgtaagtaatatgaagcttattagtgatataaagtgaatatctatattataatcaatagagacattacaagtggtatagtctgaaggatagactttaataataataataatcaaagagattaaatgaaataagatttaatgaagaaatatgatgaataatttaataaaccaatgttgacagaaaatcaacggttatgaaaaatgatgggataggatcattaattaatttattatatacaacttctccactaattgatttagtcacattatattacaactaagaactgaataatagattccccacatggagaatcgggctggcttgtgagataattaattacagttctttaaagtatataaataacatgtataagctctcttgagcgggacatctcaatatatgagagttggttgtgataacttatggtctaactttatcttaactaactactcgcataccagttccaccgacagtattcgcatagtagtattaagtacaattagttacagttataattctttattgtattgaaaagattcaacataagtattaattatttgattacgtaatattttacgtacactatctacaatatcctcctaatactttacaagtatcaataatgactggatggccaagttggttaaggcgtgcgactgttaatcgcaagatcgtgagttcaatcctcactctggtcgtattttttttggagtttatcttctttaattctttaatgtcttctaattctgacaaactatcaacctagaataacatacaatcactataatattttttaatttacaaattatactataatatacactattaaacaaggtaactgaataaaacagcctttctttttgtaacactatccttaccatgtaattcgagaagcggtttattatcaggatcaactttaagtaattcatcatccttttcagtccaaaatcctgagacattattcattattaattcaccagttttcaaataatgaatgattgcttgaataaatgtacccaacataccacatgaacaatcaaaccaataatttaaccaaagcattgaaatacctgtttgatcactaatatctttaaataattcatatggtgtactattatctccaaaatttctaaaacattcacgaatactttcaatcattgatggtaaatcaatactatcacgatgttttaatggttctggatcaatatcaattaattgtctaaagtccattaatccatcatctgcctttgcattgatcatatcaacatcatcatcttgatttccattctcattattattttgatcatcaccttcctcgtttactggttctatatgttcatttgcacttaatattgggttactaccagttgattcagataaattatcaatttttctattttcatccaatgaaatattgtattgtttcatttcatcaactgttgcagaaacaaataaattagcatcctcatcaattatatcattaccagttttgtcaattgttcttttattctttgatggctttgcttcgctttctttgatgcttcttaagttattatttattggttttgatccaattaaattatcagttttagtacaagtagttttagtattactagcatcatttttactcttcaaagcctttttgtcattaatctttctttgagtagttgaaatattagctagtgtactcaatgctgggttggaatttgcattcttattctcatataacgaagattctaaagatctagttggatcaatcttatcattagtatttggcacaaattcttcggcaatcttagatttggaatcaacatcatcaattttacttctatttttggttttgccatctccattactaggcttaacacgtttaacatttttctcttcagtgttactattttgacgtttactaatattttcattttcaaaaacatcaactttataatctcttctatcagctcttgaactcatattcttcattggttcagctggtatatttttactttgacaatcttcatagtatgtaatgtaacgttttaaaccaaattttgcagcaaattttctgtatctatctctccatgacatcgccgaatgtcttggattagattcatgtagcttttgaaaaacgtattcaggaatttgtgaaacttcaactctttttttagatgtaatcgtaagttcaccgttcttatacgcccagatatgtttacaaagtgcataatcttcatcagaggtatattgtgatttgattaatgatggtatttctgttattttcataacttcattagtttctgggtttattaatggttcgcctgtctctggatcaagtttataaacataagttaatttaggtgctaatattttacgatatctatatctgattgaattccctgtatgttccgataatggtggtaattgtgctattcttgcaaaaaatgtatgagtagatcttaaatgaggattccttctgactaaatctaaaatatattcatcttcttcttctgtgaacttgtttgattttcttttagataatgaatgtgtattattgattttgatatcagtaattgattgtgttacaccaccatgagagatatcattatgttgataacctgaagatctcgaaatggggaaattaccaatactaatttttaattcttgatttgcttttgacttggcactaggtagtttgtattttttcatattaagacttgcttgttttgtgaacgtatcataaatatacgaataagtgtattgtgttattgaatcaccaatactatcatttttagatggaaccaatgttattgaatcaggattagatgtggtagatatacttccaccacatgctataatcatctctataacagtttgattttcttcaaaatcaattggtaaataaaatgacttatctttgagtaattgattcattttattttgtttattaactcttttgttagatggttccttcaattccgttttagattttgaatccatatctgtactgtctaatgaagttatattactatttggtaaactttctccagttatggtcgtactcatactagcatgtttaacaatatctgccataacgtcagcatcgacttcaacatcatctacatcaacaccacttacattaatatcaacatctatatgtttagcaatatcaccgatatcatcatcatccaccacatcaccatgaacattttcaatttgtgtatgtgattctaaaccctgtgtattatcatcatcattatcattattttcattattatctgcatgactcaatgtagctcgtgcaaaggatgcaacagcagctgcagcaatgtcaacattatctaccgttgaatgaatattttgcatatcaatatgtcccaattttcttaattcatcatcaatatttgttgcatcaagtatagttttgtgggtatcattatcatgattattattagaaccacttgttgattccatcgattatatgagaattttcaacattattattatcattagaggaatataacattcttgtctttagctcctgcgtcgaggcgtatatcattggaagttgaatgtaatgtaacaccatctaaattatcaccctgattttcattatgactatttttaacaacaaaattttcattaatactatcatttaattgatcctgtaattgagaatgaatttgatgttcaaattgattaattgtttgatgcaatgaatcagattcattttcagtcttactgttgtttaattttcttttatttttatttccctttatagtcgatttagcaatacttacaattccattagtgtctaaccttttgcctatattatcattgtcattattactgttttcattcttataaacagaatgctccaactcacgtaaatccttgctcacctcttcctctgtcattaatactttcggagtttcctatctcaggattgttcgatccggaatttaaagctagtggtgttgtgatgtagaggaaaaaaacataaaacacaggtacaccgccattagagactccaactctgaagcacgaaaaattttaagttgataaaatttgggaaaaggaataaagttttatttttaatcatgtgcgtctttcgattcatattattattttattacgtaattgttttcattattgttggtgatttattagtatgtttagtacataacaactgtttatatgaatgtaagaatgtaaaaagtaagataaatatttttccaccagaatcatgtatcattaacttacaaataaaaaaatataaataaaaggggaaaagttcaaaaaagtggaaaagatgttaaaattttttttttaaccgaatggtgtctccgaagtccgagtttcttccttttctatcacaatttctttagatagaagagttctcaattcatcactgatcggtttcacaggttcaccagcttgcttagaattaaatgacgtccctgcagaactacgatcaataagttcaaccatttgtttgaatttcaaaaacagtaattctgatctagttaataaatcttgaacatctaacttcccactcaagtcattaatatatcttaatattccatcaaatcccttaagagtcttcataattattttactatgcttttgcaatattgctaatgcaaaaaacaaaatgaattgagaagaataataatcagtccacataatctcccataaatccatagtttctagaaaacttaattctcttttaaaccaaacaagtaacattctaaaaaagaaaaataaattactagaatcacatttctctaaatgaaaatataaatctggtaacataaattgtactaattctgttagtgtaaccatttgtgctttcataccacttaaattccttacaaaatttctctccattctttccataaagttactaaatgcccaaaatgtaattgcttcatcctttaaaacataatatagaggggctaacaaatcacacattccttgaacatatcctaagttataatttaattcattataagagaacaaaatatctctcatcaccagcagatttttattatggaaaagtgtttcattaccaaactcatcctcttcattccaatatgaaccatcataatcatcatcataatcatcatccctatcatcccccttacttgatttaaaaaaatcaacatctctatcagttctctttaaatccttgtaaattctaactttttggtctttccaaaatgcatcattttcctgtttcgttagatcagccttccaactattcttatactcaatataattattttctaatgatttctttaattgttctctttcagaggctgttgtatcccatgggaaaactcctaataggaacaaccatgcatctattctaatatcttcttcaagaccagaatgaaatatttgttcaattatctcatgaatcgtaaattgtaaactaccatttgaatcaaaaaacttattccaatcttccttattcattttaccccttcttgcagcttttgaaacttccaatggtgttaattcaatgaatttatccccaagttcaacacttattaactctttataatattcgttaccaataatcatttttctatttttttctgcctcttcttgaacacttaatgcccatttagctaaataaacacttgcactatcaaaatcatccgttatttttttaacttcaggtctttcaacatatttttgtaaagattgtggtaaaatcttattatcaattgcattgtttatttgttttttagcaaatccagttatagatgctaaacctgtcaataaattccattttgcagttgtcaaaacttgattaacttcagcattaaaatcatatgatttatcgtctttattttgatcatcgtttaaaatattcggaacaaaattcattgcatcttcctgtgtacaattgattaagaacatccccgtttctaaagtactttctgtcaatgtagcataattcttaagacaacttataaatctatcgccaccccagtataatgaattaccaccaatttgattttcagaatatggttcaaaattttgattcttaagcttctgttcacgttttgtacctaatgattcatcatcatggaaaaataatgcaggtaatctatcattttcttgttttggatgtaaaatgatcgaaccttcccataaacttgtcttcttcggtctgacttgaatagtatataattgattaatcacagcaccaaatgcatatgaagaaattgacgatatacgaggtctatcaataaatctaataatttgtggaaagtttttaccatttatatcatttttattatttgaataaaaatcatttttttcaccatctaagccgtataaatcaaaatagtcaagcgttgttttatcttctatagataaatctgattcaggaataaatgaaatgatcaattcatcatttttggaatcagggaatggtttgacgatagttaaataacctggtatattatcatttttatttgatgtaacatggatataaacttttgactttgcatataatacttgtcccttacccggagggaaatttttaggagccttcatttagacgattgatttcagttgttttgatggaaaaatctaacgaaaaggtaccaatcaattataaaaataattctctagtgttaaattaaatcattgggtcatttaacaaaatttattatgttgcgatgtgaaagggggctcaacagctagaagcccccttaattttaaaaactattaaaaaaaatgttctatttatacaatttatatacatgtgtaaagtctagttggttggagtaaataacttgtagcaattactgctatcacgatctatacttacatcattacgctcggtatagaaagatggatttctaccccttactgatataccattagttttcaaaacttttaaaacttgagtgaatggtaattttcttttattattgacttcttcaacattatcctctttcagttccacaactaaagctatttgaatatagtaataatcttttgcaatgaatttaccattattaggggttgcctttttaaattgaaatcttcttaatttaatgttttttttacctttaaaagttccaaggttcatcaattcattatccattataatataattttcatttttttcaggaactaaataattgaaaattgtcaattcaacatcagaatttgaaaaatttgatttacaactcagtgacaattgaatattttcaatttcataatttctattattcatataaagatattttggttcttcattaaaataaaggaatattaataaactattataatttctacgataacatgcaatgggcatgttatcattcataccatcattttgtaaataagtttcattgataaaaaatttaccatccaatgaacttaaaaaccccgttgatacctctctatggaacttatctaaaattttaatatctttggagttatcctcaaaaacaattaaatcaagggctttttccttgtatgtagccaaaggatctccatcttgcttgatttgttgttgttgctgctgcttctcttgttgttgttgttgttgttgttgttgggaatcatactgtttttgttgattaaattccctttgtagcaattgttgattcttttgttggtgctgttcataatattcctgttgatcatcctgatcatggtaattatgataatcattataacctccttgatttagatcttgatttctttcatcagattcatcttttaaatcattttcacccttcactattttattaacttgattttgttctttctttatattatcatcagatttatataaatgatcactaaattcacctctttcagaatgctgacttccagaaatatttaaccttgaatcatcataattcatctgtccatcattttgtttttgataataatggtcactactatgattactattcattgattcactttgttgcatttggaaattggaattatttacagaattatatgaatgaatacttgccttttcactaaccagagtgtgaatgggattttgataaggtggttggtattgtggtgaaattaattgaggtgattttacacgattggggaaatttctttgagtggaataaaattgagacatatttgatggggtattattattattattattattagaaagttgataagattgttgaaattgtgaattcactgggagaatttacctgccattgcttgatattgagggtatgattgagcagcggaaggtgaaggtgattgtatattattttgattatttgaaatataatacattggtctacttgtaaatttgagagtgcatcattgaggagtaatataaattctgattagtcataaacattattattattattattattattagtgctattattagtgctattattattgctattattattattattagtgctattattagtgctattattattgctattattattttctgaactattaacaatactcattggttgacttaaataaccattattatttgctaaatgagctgaatttaaacctaaatgagacaatgaaacattagattgttgatttaaagattgattttgatatttccaattatttggattaccattctttaaatcttttattcgtaaagtaacactatcattaaaggaattagttgattcaacttcatcaaattgtttatgactgaaaatttcatcagtattttgttgtttttcaactgcatgtaacattctatacatatcaagtctaaaacggacatattcttcatgagctggtacttcaccatcaatatactccgagatgtctacctcttgcaagaaattttgctcaaaagcctttgcgtactcgctgtgagagaccatgtgcaatcaaaggaaggaatagaagaagaagggaataaatggaagcataagaaaatagcatgatataataattttttgagataagaagtacagtaattaaataaattaaataaatataatagaatgtaaccaacagttttctaagagttttccactgcaggacgtgggccctttccggggtagtaacggacctaattttagcgccatttaatgttacattttcttattttttcttattttctcaacattttctattcgggaaaacacgtaaacgttttattattattccatgggaggtttgttattgttattgttttctattctgatcatttggaggttttgacttaaaagtttgatcttatcatatatattttatattatacatactatctaactaaatggttgaatcgattttcgattctttaaatgaaaagcaatcacaagctctacgcgttccacatgatacagtattacaagtagttgctggtcctggtactggtaagactaaattattagtttcaagagttgcatatcttttattagtatgtaaattacctccatcgggtattatagtgacaactttcactaaaaaggctgcaaatgaaatgaaagagagattggagaaaatgctcatagatcatccggaaattgatttaaatagattacaaattggtactttccattcaatttgttttaaatatttgaaattttatggtaaatatattggtttaagtaaaaatgttacaattgcagatacaaaggatcaaagagatttaattacaacagcaattaaaaatttagatttagataatgtaaaggataaaaggaacactattaatgaagttaaatattttattttaaagcaaaaagcttcaggtttattccctgataatgttgttacaactactgatacagaagctcaatatttacaaatttattatgaatatcaaagattattggcaaaacattcagcattagattttgatgatgttttacttcatactgataaattacttcaagtacgacctgaatgtgtctcatatgtcaaacatattttaattgatgaattccaagacacaaatgatattcaattcaatctaatgtacaaattatctaaatactgtagtaatagtataactatagttggagatgcagatcaaagtatttatggatttagaaatgcaacctatgctaattttaaaaaagttgaaacaattgcattacaaagaaatcaaagatttgttaaaatttctctagatcaaaattatagatcaactaatgcaatcttacaattagctgaaaacttaatgaggcatcaaactactagagaaaataaaaatttagtttctaataataatttagatatccctgttcattatatcaaacatcgtgatgaatatgatgaatcatgttttattgcaaacagaatccataaaattgttaatgatcccgcaaataaatacacatataatgatgtggcagttattgttagagtatcaagaacatttttggcaattgaaatcgatttaactagaagaggaattccttatagaattgtcaaaggtttatcattttgggaactaaaagaaatttcaatggcagttgattgtttaagaattgttgcattaaatgactggcttgctttcaaacgtgttattgaatggttttgtgctggttgtggagcaaagttgatattgaaaattgaagcttctgtatattcccctgaaattaacaaaaataataatgtttttgaaattgtcaaatcatatgcagatggtaaattaccaggtgcaacagctaaggcaaaacaatccttaaaaaatttaatttcagttattgaaaattgtaaattggagattgaacaactcacaactttacaatgctttgaagtacattatgacaaaatttgatcttattgataatgtactgaaaaagaagacaagtaaaaaggatgaagctgaaatattgtcagatataaatgctaatataaaagaattaaagaatcaaatagttaactatgatccagaaaaagacgatctattacagaaggcacatgaaaagacttttatagaacaagaaatgttgaatgcagggtactgacaacaaagaatctgaaaacattaatgatacaattgtgagtgaagattcttcaaaactcaaatttattcaacaatttttggaacatgtgcatctagcagaaacagtatcttcagatgatgaaaatgataagggtaaagtaacattaacgacaattcatggctccaagggtcttgaatggtcagctgtttttattccatcaattgttaataatatattaccttctaaatttgctcttgatcaacatgattattttgcaccagatagtttaatagatgaggagagaagatgtttttatgttgcgatcactagagcaaaggaacagttattcttaagtacatacgatgttgttatgaatgatattatggttgcgaaatcatcttgttttcttgacgaaattcccaagtcatgttataaaattatcagtagttttgtcacccctagtccaacgtatggactaggtgggatgtacttggttcaacctaaaacttttgttgttgaaaagatttttcgacatcattctactactacaaacataccaccgacagttttaggttcaacaggaatgacttacaatccggtaactggtgctgttgttagaccagtcaataataatcaaccaacttcaacatacattaagaaagaagaaaatacagatgaccagaagaagccaaatttgttaagtacttctaatcaaataatgaacaacactcttaatcaaattccaacttttactaaagtaaagcaagagggcaagatttataaaccgactgttaaaacaacagattcaatacaaaatgcaacaacgttagctgtcaataatatgaaaaaacctacaaagaagaggttaggaatgggtagaccaatatctcagtatttaactaaaaagaagttatgataaaattttcattttatatatcattctaagtgtatttttctgaaactaacaaatacctatatatcttttcgagtaaactgtttataaatgaaatggcaccgttcacctcttccagttaatagtacaataacaaagatagtattgcaaagtattacgtaatgtgttgagatttgattttgaaatttatcctaaacgggtgcatgaaaattttcttaacaattttttttatctatcactaaattaatgttaaaaatatttttttatttatcacttattcaagttataatcttgaatatagagttagaaaacaaatatttactttgctatataaaatatgtctactttagtaccaccacaatcgaaaagacaaaaaagagatgcacaacaaccacgtgaagttgatataattccaagtgatttaccaaatgttttagtcaaatttcaagcatctgatacaggagaatcagttggcggttcaattagagttcctggtgcaattactgaaaagcaattagaagaattacttaatgaattaaatggtacagctgatgatcctattccatacactttctctttagatactgaaaaagatttagttgatattaaggataatctttatgcatcagttcttaaacctggattgaaaacaacagaagactttttaacacttgtatatacaccaagagcagttttcaaagttaaacctgttactagagcttctgcaacaattacaggtcacggatcaacaattttagcagcacaatttgcaccaaatacaagtgataaattagttaccggagctggtgattcgactgctagaatttgggataccaatactcaaactattcaaaaaactttaaatggtcatagtaattgggttttatgtgttcaatggtcaccaagaggtgatgtaattgcaactggttcaatggattcaaatatcaaaatatgggatgctaagactggtgattgtttaggtaccttatcaggtcatggtaaatggattagttatttatcatgggaaccaattcatttagttgaaaagggtcacaagccaagattagtttcaggatcaaaagatggttcaattaaaatttgggatactggttcaatgcgttgtttaatgactatgtcaggtcattcatcagcagtttcatgcgtcaaatggggtggtttaggattgatttattctgcatctcacgataaaactatcagagtttgggactctaaggatggtaaatgtttacaaattttaaaatctcatgcacattgggttaatcatttagcattatcaactgatcatgtattgagacttggtgcatttgattataagggtgaaactccaaagaatgaagaagaagagaaggaaagagctttaaagaattttgaaaaagttagtaaaattggtggtaaattaactgaaagacttgtaactgcaagtgatgattttacaatgtttttatgggaacctagtaagtcaaataaaccattatgtagaatgacaggtcatcaaaaattagttaatcacgtctcattttctccagatggtagatatgttacatctgcatcatttgataattcaattaaattatgggatggctagagatggtaaatttatctcaacttttagaggtcatgttgcaccagtttatcaaacttcatggtcatcagattgtagattattagtcagttgttctaaggatactacattgaaagtttgggatgttaaaacgaggaaattaatgtctgatttaccaggccatttagatgaaatttatacggttgactggagtgttgatggtaaaagagttgcaagtggtggtaaagataaatccgttcgtatatggacacactaaacctttgattatatattctatattatgtttcagtaaccttatctattttatcaatctattatatagtgcatatattgattgcatcgattatgatcctctattctttaataatctggggaaattgatattacgtaaacatccacatttttgaatttgatgacttgcgttacaactgacaccaaaggttatattaaattcgaagatgctcttcttcagcagaacagtcttctagaaatcaatgatgacatcaactaacgtattcaaatctcccaaagtctctcttatagttgcagcacttttaccagaattaggtattggtaacaaaggtaaattaccatgggcaattaaacaagaaatgaaatatttccgtaaaattacctctaaaactgcccatgaagagaagagaaatgcagttattatgggacgtaaaacttatttatcaattcctaaaagatttagaccattaaaggacagacttaatattgtactttcaagagatgttgaaaaattaaagcttgaaattggtgctgaactaattgataatgaagataatttacgtttatcagattcattaagttcagttattgaaagtttacaagatagtgataaaattgaagaaatttttataatcggaggagctgaagtttataatcaattgatcaagggtcaccatgatttaattgatgctatctatcttactgaaattacttataaggataaattagagatggattcatatttcaatttagataaggatttatggattaagtgtgataatgaaaagttaaagaaagttcttgaatccaaaggattgcatgaagaatttgaagtcactggtaatattgaggatgaattcaagtttgattttaccttatgggaaaagaagattgtataagtgtagataacataaattaaatcaaaagtatcagatataaagtatcctaattaaagtataattagccttagaaattagcaaattagccccatcatattcacgtgatacatacgagggcataaatttataaaacacacccacaccacatacaaaataaagcgacgcaaaaaacattgttgacataatacacagtgactgttatttatataatattgcttaatttgcagggaggaaaaaatcgaaaaaatcgtgaaaattcgctctcactcatagtggcaaagtgcagagcctcccacagcgctgggagagtgagggaaacttagacacgcacctggtgaaaaaaaaatttgtatgatattgtgagtttcaactatacttgtattctattgtaggattatttgttaatcttcttgaaattctttcatttaccagattatttagatacatcaaaaatggctgaatctcacagatgtaagtaccaacacgaatatcaaacgaatggattataaacaagttatatcattttttaatccaatattcactatccaacaaaaaagttagactaaatggacatatgaatgataaagtagttttgaaatataatatgagcttcagaattaggaaaatttgaatataatgttaatcggttttaacatttgaagaaattggaataatctcttatctatattggatttgagtttctaagtagtgaaacaataataacagaattggcggtatcgttagtttcatcattattatcactcatgtcatattatacttctttattactattatcattagatatgtacattaaaatctatctatcaaacctttcttggaaccaaaatactaacatcaaatcaaattttatttaaaatttttgttattattacagtgtacgtcaaaggaaagcacgtctcataccaaagatccaagaacgttaccaacccaaacacttctttaattaagattgaaggtgttgctaacaaggatgaagcaaaattctacttaggtaaaagaattgcatatgtctacaaagcatctaaagaagtcagaggtactaaaatcagatgtatgtggggtaaggttaccagagttcacggtaacaatggtttagtcagagctcaattcaagaacaacttaccagcaaaaactttcggtgcttccgtcagaattatgctttacccatccaacatctaattttaaactcttttataaataaatcattataaaataatttataactcttaaaatgatatataagaactatatctttcgtttagttaattaatttatctgtattttgtacattattattatcaatatagcactttattttacgtacaatattataataatacttcctattatagccatatattacgtaatgaaaactgaaaatcgacgcgtcgtgtactggcacaaaattttaattggcagaaggaggggaaaaatgagaaaagtgaggaagagaaacatgaatattgtgattataagacacagttattaataaaggaagtctttaaaatattctctttaacaacaatagctgtttgcttattcaattaataaatagctaatatgattccttgggagggtttaattccatatggacttattttaagtttctttgcacttgcaggtggtggtatgaatgccattacaatttcatccttaaccagaaatgctcaaggtccaaatcatgaatcaaattattcagttgaaacagaagataaagaatgggttagacctagaactaagactgatcaatgggataaatatttagcagttcgtgatttaagattaacaggtaatttcagaggtcaaaaggctgatcctgaagctgaggaagctttcgaaactaattcagttgttttcgcttcaaatactttaaaaccttgggttttaagaaaacatattattatgaagaactcaccatcctaagtggatgaagaaatatcactctgaaagagaacaacaatgggaagctgttaaggaaaattatttgagaagtatgcaaaaatagatcttttaatacaattaaataaaaataaccccatcttatttattttatatcatacattatattaattaataaaatactattattcttcgattcgaaaaaaaaacaattatttttatagaaattccctgaagtaaacaaaaacaaaataaatacacaaaacaaaatagaataaaataaagtaacataaaaaacatttaaaaaatgcatggtaaaaatacaataattcatgaacaatgtacaagcatcattaacactaaacttctttagatacgcatactacgacgtttgaaaaagtccatcactttacgtgcagttgatgtagtttccctttccttatcttgaatattaacaccagaaaccttacgttcatttttatttgaaggttctaatggttgtaagttatttcttcttgaacttttcggtttaactattgttggaggtgtgactttcctttgtctatcatgtgaaatttcattgacaacaattggtctctcatcttcatgtattgtaggtttgtaattactagttgatgatgttggccctggagtattttgataaaatgtaagtaaactaaatcttttatatttaggatcaacacttgtagcagctgtagaatatgattgtgtgggaagttttatggtttcatctttggttttattttcaattggatgttcactaatgttcaaagtttcatttatagcatcaattgatttattaatatgattaacagtttcattgttatcattatcttcatgatcagttgaaacatcattacctaatgtcacatcaacgtcttcatttattatttcttcctttaaattactcgtagttattggacttgaacttgacataatagacgatgattctaatgagttggatattacatcaccagctttattttcttttattgatgaaattaatgattcactagttgatgaataattactactgaatttaggaatattctttaatgaattttcagaataattactctttgcaaggaaagataaatctgctggcgtaaaactacttccaaatactggtgagtttaatgaatttggtgtataagatggatgatatgatgttggacgaggtttgttggttcttgatgatggtaacttcgttgttgaaacctcttttggtgatgaactattactaaagtttggaggtgccaatggtgctaatacatgtggtttaggatgttccggactttcctttatagtttcaaagttcttatttttatctgaagttaataatggtataaatgatattggtcgttgtgttgattttgcctttataggagtagcaagtaattcattagaactattactataacgtcttttgatttcataatctgcatcaacaactgcttgtaaaactaaacttgcagttgagccagatcttgaatgtcttgttactatttcattattagaatcattatttgcctctattttcattgtgtgaatagcagttgggattgtgcagtttgaattgttattgagtctcattggtgaactaacaggtgaagtctcagcagaaggaattgctgtagctattgatgtttgaggagctgcaggattggaatataatgaagcattcacattttgagttgaataagatctgacactctgtttatttaatattagggaagcagaagtttgattttccattaatgacattcttctattgaccttatcctgttgtgttaaaattctggaagatctatagtttttatcccattcaattggagagacggataaaaatggtgcatgaggagctaaccatcgatgtgcaatcacattatttaatgaaatccttttgtttggatttgatactaaaatttttcttagtaaatctcttggggttggctgaataaattccgggaaagttaatggagtatgagtaatataatgataaagtcttgaaatatttgtaccatctggattttctgggtcatcatcaaaaggtaaataaccagctaacatcgcatataaaataataccacatgaccaaacatcaacttttttaccttcatatggttcatttgaaacaactaattctggagcggcataacatggggatccacaacttgttttcatcagatcatttggtttgtttgtgaatgaattaacaaatccaaaatctgttattataatgtttttgtgtttgtctaataacaaattttctaattttaaatctctatgaactattcctttggaatgcatataattaacacctgatacaagttgagcaaataatctacaagcaaaagaatctttcaaatatctatgttcaagaatataatcaaataattcaccgcctgatgcatattctaagactataccaatatatttatcattttgtaaaacttctactaatctgacaatatttgggtgccttagtttctttaaagcagttatttcacggtatattttaccttctttctctgaaccagttggaattgaatctctttttataagttttatagcagcttgggatggtagttttccatcttttctccaacctaatttaacttttccaaactcaccttctcctagagtagaacctagaacataatttccaaatcgtacttctctaggaattcttcttttacctggaatttcaggaatgacagcttttgttgacattgcgtttgttaatatttagttgatgagatgatgtttatttcaaaataaagatgtattgaatatttagaaactgattttaaaaggagtgaatagttgttgttgttgttgttgggtattgagtaatgagagctgttttttttaagttactttctcaatttgagtgttttttttctagagagagttctatatagcaatataaacgatatatcacttagttatgttgaatacagatttcaaaaggagattattgcttgtgttttgtgatgtgtaacacagaaaggttataaaatcaataaaaaattagttagtaaacgtcaacatcgaaatgtcaacaaaccaaacgcgcgcatttgtttacgtctttccgaaataggaaggcggcgcgtcttttagtatggtgaaaaatcagtcaattttcaatttaactttaacaaaatatttttattttttagctttacagtttataataatataaactttaagtttaactgttaaacggtttgttgaaagcattcagtaacctattcaccttggattctcccaatccttcaacctgttgcaactgtgatccttctaatgaaacaatgtttttgaatgttttatattgagccatcaatttttgtgcatctctactactaacacctctaactccagagacacattcaactaatctctccaaaaatttcccatgttgaccaataatttcatcatctgatacacgttttcctcgtataatagcttgactcgcctctccctgaacatgctttaagtttaataaatgtgtagcacattcttcattagaccaccctaataataatgtcatttcagatgtaagacatagtttgttaagttctcgaattgcatcatgaaaatcttccacatcaacgtaaactaaaagtactcttagtgtatcaggtaaattatatgtgattttttgaaatcgcctctccacatactctggatgaagtttatgatactttaaagaaagaaagagtacaacacatttagaactgatgacgtaatccacatccttaattttactattcatttcgtagctgatatgttcaaggactgggttacctgtttgtgatctcgatacctgtatctgtgtaaaggtttgtttgttaattggcttggtatatgttttcggaactagtggtctcgatggcactattataggaggtttggtcactttagactcttcaggtctctgtacttttgcaggcagtgtccttgggggtaatacgcgtttttccgcctctggcttctgtggttgtacaacctctaccccggcttctgccctcatacgggcaagaatagcggtaaaagattgactgggtgcctctttatcttcgtttgacattgttcctcaagaaagaacagagtaattgtcgtatatacagattgtataattaataataacgcttaatttttaaatgttcataaatactcttgagccactacaaaaaaaaaaattgaatgagtaactaacgcgaaatttaattacttttcccaaaagggtaactcaattgttcatttttctcggtttcataatattaaagtattgatttttgaaatgaacagttatatgaacgcaacaaatttttatagatgttgtgtctcagactgacacgcttatctttcctatcattaaacaatggaatcaacagcaccaacacaggacatggcctttgaggaccgtgtcagaatctttcagaatttcctctcaatcagaatcaatgatgtacctgtctatgaaactgaaattcatcgtatgttgagaaacaataaaaaaagattaccaattaatattgatgaattgagaagttttgatttgaatttcgcaaatggtttacttaacacaccagctgaatatttacctgctgcgattaaggcattaaatgaaatggttcatgctatctacaacccagtggaaacaccatctgttgaattatctgaaaatgatgatttttatatctcctttgtaggatcttttggtgcttatagtgtgtctccaagaacacttaactcatcatatctttctaaaatggtttctattgaaggtatcattactaaggcttctttgattagacctaaaattataaaatcagtgcattataatgaggcaaaaaattatttttcatcaagagaatatagagatcaaactacaagttttgatccagttaatactcctgcaatttatccaactgaagataccgaaggtaacaaacttgaaactgaatatggtttatccgtttataaagatcatcaagttataacaattcaagaattacccgaactttcacctcccggtcaattaccaagatcaattgatgttattttagatgatgatttagctgatatcgccaaacctggtgatagaatccaagttattggtgtttatagatcattgggtggtggtttgaatgataacggtgctttcaaagttcttattattgccaactctgtttatcaattacatgctctttcaacatcttctaaagttacagaaaatttaactcctgctgatatagataatattgtcaagttatcaagaaagaaacaaatttttgagcttttatcggaatctttagctccttctatctatggtcatacatacattaaaaaggcagttttattaatgcttttgggtggtacatcaaaaactttggcaaacggtgcaagattgagaggtgatattaatattttaatggttggtgatccatcaactgctaaatctcaaatgttaagattcgttcttaatacagccccattagccattacaacaactggtagaggttcttcaggtgtcggtttgactgcggcggtgacaacagataaagaaactggtgaaagaaaattagaagccggtgccatggttttagcagatcaaggtattgtttgtattgatgaatttgataaaatgaatgatgttgatagagtcgctattcatgaagttatggaacagcaaactattacaatttctaaggcaggtattcatacttcacttaatgcacgatgtgcagtttttgcagctgcaaatccaatttttggtcaatatgatacttataaaactcctcaacaaaatattgcattacccgattctttattatcaagatttgatttgttattcattgttactgatgatattgatgatgaaaaagatagaagaattagtgagcatgttatgaatatgcaccgttatgtacctccaggttatgcagaaggtgaaccaataagagataaatcaaatattaaactagcagtcggtgaccatgatgtagaagaaagtggtgataagacatcaaaggtttttcttaaatttaatccaagtatacatgcaggtattacagttaaagttcctgatggttcaatgagaccgttagttttaacaattccatttttgaagaaatatattcaatatgcaaaggcaaaagaaccaataatgaccgaaagtgctaaaaatttaattgttgatatttatgcttcgttaagaaatgatgagaacaccaaaaattcaagaacaaccccaatcacagccagaactttagaaaccttaattagattggcgactgctcatgccaaaattagactctcagcaacagttaacgtcaaagatgttagagtggcagatgaacttttacgtttctctctcttcaaagaagttaaaaagaaatcaaataacacaaataaatctccacgtaagaagagaagaactgatgatacaggtttatctgatgatgaagacgaagaagatgatggtaaagaagcagatgaagaagatatggaaatatataattatccaaatcttcaatcatcaccaacccaacgtcaaactagatctcaaacacaatctgtgcgaattcatcaagataccaatacagaagttgaatccgttagaaaaaacttagaaaacttacaaacagcaactgaaagtactaatgacgaaaatataaacttaaatttaacagctgcaactactttacaaccagtgagtgctgaaaatgcaaattacaaccccggtgttctttctgacattcgttaccaattatacaaacgcagcgctatctgaactattcaaagttaataaacaagatcaatatactttcaatgaattaaacgaaatgataaatggtaaactttcacaagaagataaatttggacctgatgaaagttcccatgccctacataagttagaaacagaaaatattattatgacatctgataactatatttatccaatttaagcttgttgattacatgtataatctctatatttttagttttatgtattttaaaatttatgtcacctttaggtgcagtattataattattcgtggatataaaattttagctccaggaaatttatgcatgatgttccttttccgatatatagtaaagtttctttttttgagtctttctttaaccataaagaatgtccgaagataaaccacatggaatgccacaatttggtgcaagtggacgaaaaatcgtttatgatgaaaatgggaaaccgtaagtcttgaaaaaattatcacttttacacaaatatttaacttgattactaaccaactttagatgccgtacatgtaacacattacttgatttccgttcgattacaaacaatgctacatccaaagctgtagctggagttggtgctgttactgccactgctagtgatttagcaacaaatgatagtactccttcagattgtcctccggatgttgaagaattgggtagatcgacatggacacttctacattcaattgctgcaacatatccagaaaagccaactgatgcacaaaaagacaatttaaagacatttatgaagtcattctcaaacctttatccttgtttctactgtgccgatgattttagagagtacatgaataaggaaaaaattcaagtcaccaatagagatgaatttggtaaatggttatgtaatgcacataacgctgttaatgttaaaattggcaaacccgtttttgattgtcaattatggaagaaaggtggaaagatggctggaagggatggtagatgcgattgagcttgtacataaataaagtttttaattaggtcatctatataatagacatttataaaaaatcgttacgttaatcttgataaatcaagcggaatactacttccacgtccactaggatatagcttgatacgaccttgaatttatgaggttttggtatttcgttttgttccaaaaacttgaatcttgaactttccatttttgtaaaacccgaagaagatgaggatggaacatttgcattcccatttttattcattgaaccactgattgtatatgctgaaatatctattttacgtatttcattgccagcaacttgtgtttgtagaatttgatccttctgttcatatgctataccggattttgatttatgatgtcctctgaatccacttccaaatttagattttatactagagaaaatattgtcttcaccaacaggaatatgcgtcttagattgtaatggcaatggagaagcatgtgaagctggagttatatttagtggctgtgtatcgactgttaatgatgtattagagtattgattagttgtagatgaaggaggaggtggaggtggtgccttttttctacctgatgtcattgatgtttgattagaaaatacactcatcgtatctgaatcatcaaaacttgtttgcttgtatgatggtgtaagcgacggtggtgctggtggagctgttgaggggagagaaggtgcaggtggtacaggagctggaggtgtaggcggaacacttgattgtaccgttataccagctacaccaaaacctggaggtggtgcaggtggagcagatggtggagtcgaaaactggaatggatggtgcagcagatggtaatgatggaggagcaggaggagcgggtggtattccactcggcaacgacggtggaatacctattggtaatgatggtggtttcggagcagaagatgaaggtatctgggtgattgaattattcgatttatgtgatcgtttcattatttcatccataagtggattaccactaggaacaggagctgatggggagcttgggggttttggcgctgacgctatcgctttatcttgctctaatggtgcacttattccttttgaagccttctttgaaacatccttttcatctatcacataactatcatttcttctttgattaatttcggctaaaaatggcaatcctcctgctgcaacagctggagttggtgctttatttgcagtatttttgaatgatgggggaggaggtggacctggcggtggaggtggcaaagatacagatgatgaaagtgaagggggagctggaggagctggaggagctggaggagctgctggtggtggggctgatgaagtaattggaggtggtggagcaactggaggaggattaactgctggtacaggtggcgccatagttgggagtgcagggggtgtaggagcactaaatgatggaattgaagggattgatggtggagcagcagatgaatgggatgtattcgatactttgtttaccttatcatcatcaacaacatatgtatcgtctcttctattattgatttcattcaaaaatggtaagcctccagacaaagctggcgcactctttgtattatttgattgtttccctgttgaaggtaatgatggtggtggaggtggtcccggtggaggaggaggtggtactgcagaagattgattgttagcgaatgatagggggtgtgccagatggtaatggaggtgctgatgttggaagtggaggtgctgacatgtttggtaatggaggaggtgcagtaggtgttgattgtttttgacctggtctctttgatggcatctttggctttgatttgtttggaatgtggtcggtcagtgaagaagagatagatggagctggaggtgcagttggaggtatcattggaggaactgctgtggggactgagggaatttgtggagcttgtggtggcggcatcgttggaatggatggtgctgacggaagagatatcgttggaattgatggagcagcaggtggtttgaagttgattgaatttctatttggtcttcctgatggaacttttggaaatgatggagctgatatggaaggttctttaggttttgtttcagatgttgctctatgcttaagtttaggcataccacctgcaaatatatcacctaattgtggtggtccacccatcgatggaacttgaggagctccagaggaaaatgaaggaattgctggtgcacccattggcggtctattagatgatgatgagttaggatgaattaccaacaactggagctgatctatcatttgtaacagctttctttaaatgagcaccttttctaatatcacctagtaaagcgtttctatcaggtgtaactttaggtaatccttgagcaggaggggccattgcaggaggcattcctggtggcggaggaggtggtggtggaggcggaggtcccataatgattgatgtccgacaattgattgtgattgattaaagaaagtattcaggaagaaagacaatcggtaactgcaattactaaacattgtgaatcccctggttcgacattatcatgatttgcttgcgtaataaaaaatatttgtaaaatttcactttttgaagaattttgtgtaataaatgtcttttgtggtaggaattaatacgcaaaatgttaggtagagtatatgtacgatggtttgggataactagaaaagttttacaagaacaaatatctgacaagggtattaaaattgcctcaaaaactgataaatatggagaaaagactgttaatgctgatccacaaaaacttttacgtacagtttatatgacacaactaccatatgaaataacaaaggaagaactcagtgaaatatttaaacgatatggaccattagaatctattcatatacctaaaaataagggtaaaacccatgccagaggtgatggtaatattgtattttctgatgctagaaatgcatatcgtgcatcagttcaaatgcaaggtcatgtacttaataataaaccaatcaaacttttacttggtaattcatttcaaaagaagataaatgaaaaatatgatgttgttatgttgaaaaatttatcatattcagctgaagaattggatataatggaaattctaagaccatatcaagtgttaagagttggattagctagatcaccaattaaaaaggaatgtttagggtatggatatgcaagatttgctaatcctgatatagctgcaaaagcattagacgagcttaagaatgttaaagtaaagggaaggaagttacgtatgcattttgctgaaaagaaagcacatgattataagtttattgtgtaagtaacatgtatagaaaagtatagaacttgtaaataaaagatatcaaacatttagtgtttttttattaaaattaatacacaaattagattataaacaggaaaagatatctaatagatctaaacataaatataaatatttaaggttcatttcatttattattttctttattaaaacagcttcacttcaaatcattaagagtcatcaacattatagtagtagtagtagtagtggtagtcatagtaggatattcaaattaataaatttattcctttgccttaacaataccaactttagcagctcttaaaactctaccgttaagttcataacctggttgttgaacaaagaaaacggtacctggttctttttcttcgtgtggagcttggaaagttgcttcatgtttatttggattaaattcttcatctaatggatcaattttttctaaaccatgtcttgataaagttttttcaaagacatctctagttaatttaacaccatcatataattgtttaatttcttcatttgccttaactgaatcttccttaacggatgataaagcatgaccaaaattatctaaagattcaataagatcttttgcaaatttttgaagtgcaaaatcttttgccttttgaatttctctctttgtagtttcttgtaaattacggaaatctgcctttgatctaatataactatcctttaattcaacatattctttttctttcttttctaatttttctcttaaagtttttaaatctttttcaataggagataattcttcattaacagcatcttctgcttgttctgatttttcggagtccttctttgcatcattaaagttgattctagcagatgagaaagctcttgcagggaagatagcttgagaacgagctgaagcttttaaaactgaagcgaattgtctttgcatgtacatgattagtatacgagtgtctgtagtgtagtactttagcaataacaaatatataatactacaaatcaaataaagccaatagcaaactacttccttcaaaaggccaacttttttcgtcaaaacttgaaatttgccattcagtgagaaattcggtcattggagcttttttttctttttctttttcctttttgcgtttcttatatttcttttctgcgtttccaactttttgcctgcaagcttttcgattctgcttagaataacagttgtttttcttgtcaatcttattcttcttctttttcttcctttatcaaactaatataatcatgtctgctactactataacggcagatcagtttgctgatgattactatagctctttacaggctctcacatttaattctcgtcctattatcgaatctcatactgcgttggctcaggagaatagtcaatttgcatcagcaatcgtttcagcaattgaacgaagaattgaaaaggcaataccttctcaaaaacttttcgccctgtatttattagattctatatctaaaaatattggtgtaccttatactactttattctctcataatttatttaaaacatttactcaaacttatggattagtcgatgatccaactaggtgtagattaattaaacttttcaaaacttggaaagttccaactgctataactggtttaccattatttgatattaatcaattggataaaattgaaacatttttgattaaagttacaaatccttcaaataacgattctaataatgttaatagtataaataataatagtataaataataatactattaataataattctaatgatcttaacattgataataataataataatataattaacaacctttctactcaaagggctccattaattgcatctaaacctaatttaattattgaagttaatgaattaatattgatggttaatacaagattacaagcttcacctaatgatgaaaaaggtcaacagagattcaaattattaaatcagttaaagacaattattagttcaaattcttcaattccacaaacacaacttgatgaagttgcaaaacaattacaaagtataagagatgatgaaattatgaagcttaataatttgaaattacaacaacagaaagaattacttaaacaacaacagcaacaacaacaaaaagatgtaccattctctgtttcacaattacaaaattttatgaatatgggtaccaatggtaataataatggtaatggcaatggaatgccaactaataataacaataataatgttttatttaatatgatgaattctgttatggcaaacaataaaccagaatctccagtagttaagtcaccaccatcaatgaataccccaccaccatccactaatccattgggattaaaaaatattgcatttcttgaaaatatattaaaaaaatctgctaatggtaataatacaaccactaataacagcataaatacttccattaataactttacaaatagtaacaataataagattgactttaaatttatcaaaccaacaaaggaatcaatacttgaagattttatattatcacaaagttttattaataatcatgtacttactagtaatgaaatttcattattgtataattttaaacctatacaatgtgataaatgtaataaaagattttctgataataatgaaggtacgattttaaagaagaatcacgatgaatggcatcaacgagtagaacaaagaatgaaaattggtggtagtggattaggtggtgttgttaatagatcgtggtacttaaatgaaaaggattggattgaatttgattatgatttagatgagaaagagacaaataataatatcaataataataatgtcaataataatcatctttataataacaatgtttctgctatgaataataacaatggtagtaataatttaacaaagttaaaggatggtaatgttattgcacatacttcattaaagattacatcaaatggaacaaatgataagaaggatagagaggatagaaatgataataagattgatttatcagaggcaccaaaacatattgtacgtatacctgaatcatcaaataatgaagttatttgtaagatttgtcgtgaaatgcaaattggtatatttgatgaagatgaaggagaatggatttggaaaaatgcaattgatattaatggtacagtttatcattggagttgttggatggaagcaaagatgcgtaataataagagggatagatcacctcaaagataaaaataatgttctgcatagtatgaacattttgtataattaaaactttataaaaacttttaaactaaacactttactaagaacaattacaaattaaagtatttgatcagtttagttgagaatcaattcaatgtattatatatacattgtaatgaatattgataataatattagtatttaataatttaataataataaataattgtattttttattgaatttataatatataaaatttgttatacacgaaatagtagatgaatagtaatataggaataaaatcattgagaatctaatgatgagctggttttggagcaagataatcttcataaactgaatatgcaataaaagcacctaaaccgatatagaaacctgggaaaagacccttgaatctattagatttagagaacaccccttggtatctccatgcatctctctttttccatggatcagataaagtagccattgcttttagttatagtatagcaaaattcaaaagatctaaatcttactctaatctgaaccaaatttaatgttatagaaattcatgttcttctttaactattagagaggggaatgaaaaatattatttaataagatttctctggtgcacagatagaatttatttattttttaagggcccagagacgcgactgctggtttggggaaatttttaaaatttttcaccctatttaaatattttgatctctctttaacatgaatttaaggttaaatgctgattaaattgaattagttactgtttagctaagaatggatgctatatcgttacaggataatggtgaaactaatttgtcggagtctattttggaagaaataagaacttcagcttatacttgtctggtttgtaccgattatttaactccggaatctcaagtttggtcttgttcaaattgttatagagttttcgatttagattgtatcaaagattggtcaaaaaggggttcatcaactcaagatgaccattcttggagatgtccttcttgtaattttaatcataataaaattccaaaacaatatacttgttggtgtggtaaattaattaatccaaatattaattatttagaacctcattcttgtggtaatatttgttcaaatccgttaccaaattgttctcatgaatgtacaaaatcttgtcatcctggtcctcatattgaaaaatgtacttcattgggtccaattttaaaatgtcattgtggtaaacattcaaaacaattaccttgtactttaactccttataataatggttggtcttgtgatgaaatttgtaatgatttattatcttgtggtatacatagatgtcagaaaaaatgtcattcaggtatttgcgatgattgtgatattattattgattcaaaatgttattgtggtaaatcacatgataaaatttattgtcatgatagattaccgaaaatttctaataatgaaaaagaaaaatggattggaaactttgaatgtttacaaccttgtgatcaatacctagattgtggaatacataaatgttcattagattgtcattcaatttcaaaagatattcataaatgtccaaatgatcctaaaaatttaactaattgtccatgtggtaaacataaaattaatgaattattatcaagtccaagaaaatcttgtttagatccaattccaacttgtgataatatttgtaataaaagattaccttgtggtcataaatgttattggaaatgtcatacaggtgaatgtgctccttgttatagaagtgttgacaaagattgtcattgtggttttactcattattcaattgcttgtaaattaaatgttgaaggttatcaaccaacttgtcaaactaaatgtaatgcaaaattcaattgtaaacgtcatttttgtactaaaaaatgttgtgattatagacaacaggcatttgatagatcaaaattaattaaaaaacaattaagaaataatgttattacaactgcaattgctgatcaagttgaatttgaagatgttcatacttgtaaacaaatttgtaattcattattatcatgtggtaaacatcattgtaaggatatttgtcattctggtccttgtcgtccatgtttagaatcgtcatctgatgatttagtttgttattgtggtaaaactatagtatcagcccctgttagatgtggtactcaattacctcgttgtccttaccaatgtacaagacctacatcttgtggacatcgtcctgaacatcataattgtcatgaagatgatattccttgtccaaaatgtacaatgttagtaactaaaacttgtcagtgtgaaaagaaaaatttggttgcaaatgttatgtgttatcaagaaattgtttcttgttttaaggtatgtgataaattattaacttgtggtagacataagtgtaaaaagacgtgtcataaacctggtgaatgtactaaaaaatgtaatgaaaaatgtctgaaaattaaatcatgtggacatgaatgtgaacaattatgtcatggtgataaaccatgtaatgaatctttaccatgtaaagctaaagtggttttaacttgtgattgtggtagaagaaaacaaccaatgttatgtttttcagttaatgaaatggtcaagcaagaaaagcaaagaaaactagaagataatgaagccaatgaagttagtgaaaataatgaattaaaaaatcaacaagataatgttgatgaagttacaccaactattccatgtgatgaggtatgtatcaaagaacgtagaaataaactgttgtttgaagctctaggcttaaatcctgctagaaccaaagaaactgaaatctcaatcaaaatgaaaagagttcaatcaatatacacacaatttgttttaaatctttattctaaacaaacagtttggtgttcaagtattgaagatatattgagaaaagtattaacatcagcaaatgatacaaattttcgtcaaatgaaaaattcacaattaaagcaaggtcataatttccgtccaatgaaaccaattcaaagaagatttgtaaaagaattagcagatgcatatggattattctcagaatctcacgatcctgaaccaaaccgttctgtttttgttaaattattaaatacatcatccttgcctgatatggatttaagtgaagcttatgcagtttacaaagaattcaaagaaatagagaagaaaaaagctacagagagatcaattaaaattctggatgcaaacaataatactggttatcatgatgaaaattcaaaaaatgactctaaagtacaatataattattataatggtataataatcaaagatgtttattttggtattactgttgaaactgttgatgccgcattatacaacttatggaacttgaaagataatgaaactgatgagaaagttttcccattaattaaaaagggtaaagttgaattcattaatgaaggtatgtacgtcttttatggtgaagatatcattgaagagttattagatgctgaaaatattactgatgtaaaatcacaatatgaaacacaaattaaatcattatgtgaactttttgatgttaaggttaaagaaaaaaatttagcattaaaatgtattcctgttaaaattgatataccggaaggtataattttagaaataatgaaagaagaggaagttgtaattccaccaaatgaggaagaattaaacaatttagaagatgttattgatgattttaaagatttaaaaattgaatcaactgttgtaaatccgaaatcatcagaatggtggtgaaaaccatttatagaataaaccttaaaatttatagatttataaaagtttactaaaaattatattatttgtattgtttcaaaacccaagaaagacatgtagcaacatctctctttgaatgatatgatgattcaattacagtttcattaacgtctgttttaactactttgacattcattgtaatatgtaaagttgagtaactggaagttaactctattaaaatttttaaattgttatattgaagtgataatacactgacaggtgccatttttggatcagttcgtataaatggatcattattataacatttctctaaggtaatagattcactggtactcttgtttggatcattaatatatttttcaattaccaagtcattttctattattttcattgcattatctttagtttcgccaacctcaagtaatagtgatgctaaaatttctttgaatttctttatcagttggttgtgtctagtatacatcatcataggtctaatcaaaacagcatgcttgtttcttgataatgtttctttactgagtgctacaggtggaagagacaattcttgtgtgtttttataattgttggcacataacatgattctgaaaaactttattatatcatcagctctatcattttcaggtaattcgggagtaggttgagttaattctggagaattaatatttaatgattcaatttgaaccactctatcatgaagttcaattctaatgtgattattaacaattttgacatgtacattgactaaagttgttgcttctttgattaaactccaaaataattcattttcaaaaataaagaatcttgaattctttatttttgagataaaagaattgtcatttagagacgtttccttctttaatataccataagagtctgattgtccaattagttgttgactttcatttaaagtatcagagtttgaatctttagatttggaaaatttgaaaatcttaacagagacaactttttcaccactccaaatcttttctctttcattagtattgaatttttcaaactctaaatgaccttctttaccttttttcaataaagctataccattatcaaaataattactacctgaatcaccataaccatatttaattgcaagctctttcttgaatgttttcggagtaacaactgaagtaattaattcatgttgatgaaaaacattcaatacttccttccagtatatattatctttctctaaatccgtgctcaattttgaaacagtacttttaagtaaacgtgatgattcttgtaaactttggagtttccatccatgaccaattttctttgcatttgcatcgtctaaattacgtttcttttcaaattcttgatcacttattgtaattctatcgcatgaaagagatcctagtttcatattttgtttcaattgtgaagacattgatgaagatgccgcagcttgcctgacagatgataataataaagaaataaaatccaatgtcattgtagatgatccaagtgcagttcgtacatattgcagaatagcatttcttttttgaaaaaactctgcttccttcttccttgcttcctctatttggtggtttaaatctgattcctccgtattttccatttcaacatccattgaatctccatcattggttgtattagggacagttaaagtatcagtttgatcatccgtcattaattcactattaatcatctgtattaatctttcctctgtgatcgtttcaaagggaccatattgggtaactaatgaacgaatcatatgttcagttggatgtgcataatcatccttttcactcaacatttgttgttgatgtttgtaatatggatttggtaaatcaacatgtgcaccttcaataagagatttcgtaaattgtaaatattcaggttccatcactggatacactggagatgcatcatcattctcttctttattctctgcctctttatcactcattgtcccactacctgtgataatcctatatacaaccaaagaaagagagttgaatacttgattgaaatcattacgtaacatttgaaaataatttttaactttacagaaaggctgtgcaaccataatgcaatttacattcaaccttcccttcaccgaatgctccctatcgttgtgtctatctttattactagtaaggaacaatgctgaacaaagatcctagtcaaatgtccttggggccgcgtgctcgtttagacacagactatgttaatgaagaccatattaaagtatttcgggatgccttaagttatgatgaacacaatgattacaatgataatataactcgagctgattcaattgtttcaatagctgatacaccaacaaaaccgcatagctctggtgttgaaactatatcatctcagtctgactggacaccggtttataataagactaaacctaggaaatctgaaattattgaaatcgatggtgctgctggtgatgataatggtaatagtgataaatttagcagggtaagcagtgcatcagttagtagaccagattctgcagcatcctcgatacacgttgatgaaaactatagcaactatgatgaatcctcaataacatttacaattcttagataccccctattgatattcattttttgttggacttttatcttatcaatcttatactttatcgtaagattatccatctcattttcagaaaatctaatgctgaaaagggataaagttagaacggaactagtcacaaatttaagaaactctaaaaattacagtgagtacgtagagaattcaaagaaattagataaatatctcaagcttgatgaatggtgtaatgatgatagatacaaatattacgattggagaaatcttagaagaactattggaaacctgagaaagttaaggcatgccaaaaagtatgaagatttgatggtggttttgcaaacttgtattaaatcaaattttgcaggtacggaaaacccgttaatgtactcacattgttattatggaacgaaaaagttaattgaaaagtataacagtgaagtggtaaaatgtttaaatattattattgaaaataaggaaataaatataaaggagaagaggatatttttcaaaattattaacaagaattttggtagaacatgtttggttttaagtggaggtgcatcattttgctataatcattttggtgtactcaaagcacttattgaaaatgatttaatgccaaaaattattagtggtacatctggtggtggtatgattgcggcacttgcagcaactagacagaatgatgaacttctagccttgatcaactcaaaactatcaagtaagataaacgcatttggatcagaacctttttggatttggatgaaaagatggtggactacaggtgctagatttgattcagttgaatgggctaaaaaggctcaatggtggacgacaggctcgaccacatttgaagaaagttaccttgaaacaggtaaaatattgaatatatctaccgttccaaatgatattcactccccgacaattctatgtaattatattacatcacctaaatgttgtatctggtcttcaatgttagcgtctgctgcagttccgggtattttgaatccagttatgttaatggaaaaaactaaagacaatattattagaccattttctcttggtagtaagtggaaagacggttcattgagaactgatgtcccattgaacacattaaacatgtattttaacactaaattctcgattgtttcacaagttaatccgcatgttatgttatggatctttaaaaatcgtggtgatataggtaaaccaattatcagatcaaaaggtaagacttttagaggtggctttatattgagttacctagaaaacttgattaaattggaaattatcaagtggctgaaattagtgaaagaatttcaattatttccaaacttattagaaagtgactggtccaatctatttttacaaaattttggtggaacaataacattattccctaaaatagtattaagtgattacatgtatattctgtctgatccgacggaagaaagattagctagaattattagcaacggagaaaaggtaacttatcctaaattgttatttatcaagcaccgtttgaacattgaaagagtcattgaacgtggacttaaagaatgtgatgttgatattgatgaaacatttaatgcgccaccagatttggttacaaaaattgatcaaagcatcaaagatgacaatcttgaagagaaccgtattggtgatggtggtgcagatagtgatggtatgcttgatgatactgatagtaatgaaagtgggaggtctaatttaggatttttaggcataaaaatgaaaagaaatgaagtggtaaatgaagaatggtatggttcctccggatatgacgagaactacacaacagatgaagatacatccaatctaagtccataataactaattcattagcgtatatataatattattaaactatctatctagaatatactttataatcatatatcaattgaccgtaatcatcgaaagaatcgattgtatccgcttctgagagagtcaatccaagtcctgatatcaaattccaaagactatctcgtacatcttcgaacctttctcttctaccaaccatgaatacaactttagaacctttttttgatgaaagcaatgctttaacggtatctctgacccaaaacggatgttgatgtgaatatacagggtcagaaaaaatcaatatttcaaattttgtttcagttgaatatgatctttctaaaaactccgatggatttgtccagtctagataggtaacagttatttcatctgtcttttgtgaaatggtgaatttttcatcagaagaaagtaaattgcattcgatgttattaagcttgatattctgtgcaagattgtctataatttcaggtaaatcggtagaaataatatgatgttttgtattttgatttgcaagtattatggaaactaaaccagttccagcgccaagttctaagattggagaggggtcattgtagtctaaccatgaagatgtgattgatgaatttgaaacaatagcattagataagacaagagatgcaccccatgtaatattaccaactttatcctctgttaaagcaggttcatataatgcaatcttttcatttgagttatctagtttaatatatctagttgaattacctcttaaagcaggtgcaaaatttgcagacatgatataagaagctagatcatatatcaaatctctttcttcttctgacaaatgtgataaaggatgtgcaattattcgtgtaagatatgcagttaaatcagttgatgccgttaccggtagggctgtatatgtgagaattgtagtttcaggtaaagataagtagttggatatttgtttgatattttcaggttgaagacctatatcatctaagcatactaaattatctgtatctcgtgagaaattagttgtctttgctggttgtaaaagttttagtgttgataaaagaatatcaaatggagcaaatggaagtggtaaatcaagtacagttgccggtatttcctctatttcttcaggatctgccactactgcctgtaattctccttcttccttcttctctttctcttctttttcaactgaaatcaaaactgtttcgtttaatgtctgtttatccaaacttgcttcagtcttttcagttgattcatcttcaatagacacaggatcaaaaaaactcaacggatcaaatacatctgacataactaactattcctgcaaattaggaataagttcaagatccatgtaaagtgaaaaatttcaattaaactctttgattccatgtagaacgaatatgtcaaagattacgtaatcattgaaatatttacatgactttattatgcatgtagtaattcatgaaactttcgtgtttgaagtgtttccaaggattgaaagcagttgtgaataggccatacatacatgacagatatacccacacttagcgcaaatgaggtagcgtttttagctgaacaggaagaggtgtttgtactttcaagacattcacttccagcaattcatatgattgggccaacaattccacgaatgcaagcacttcaacgtcataaaattcctttatggagtgctattatattgaaaagacaacgtaaatgtaatatagttacacctgaatggctttctattgaagtattaagaagagcagtcagtttagaacgaaggaatcctgcatcacttttaacacctgaacaacttaacttaccacaattatggccagctatggctcgcatgcttttacaaaatgcacatgatgatttaattgattcaccacatgaaattcgtgctgctttacatgatttacaggaactaagagatgtaaaagtacatagaatgttacgtacaggtactcaaaacctttatggattatcacattttgaagttgctcaacttagacctttattattacgtcaaattaatctccttcttaaacttaatgaaggtgataatgatgaaaatgaaaatgggactggaattgataatggtattaacgatggtggttttgataatcacgataataatgatgataacttaaacaatgatccatttgacagttacccatctaatgaagaacacaaagcatttggatcatctgatggtcctttcaacagtcttacaacatctccaccgccatttcctaatgagtctacactaattgaagaaaatccaacgaaacgtcgtcgtatgggaggaaacacagctccacctcctgaatctgactctgattccgataatgatatagaatttagacgatagaatttttgtacactactttttatatatttatatgttagtaatatattttgtaatacttagaatgagtatcgattgtataagagatagaagatatagacttatataatggtttaatgtgtatgctgacataagcaatagatgaaaatggtgaaaattacaactttccattttgtggaataaaaaaatcaaatttcatgaaattctttaacattatcgatttcaacaatgcatcattttgattttcttgaatctatcaagacaaccccttaaaatgcttgcaagaacacgcccatcaatactagtggcacctcgtttatttttgagatttgcttcaacctcagaaatcgtttcaaagaaagatccagctgttggaatcggtgcaaaatcaagaaagaaaaataaccaacaacgtccaacaattaataaagttggtgttccacatgatccatatattccggttgcatataatcatttaactttgagtaaaccaggacaatcattacgtgcactttggaatagacttaaattatttgcttttaattgggttcaagtttatcaatttaaatcaggtatggaaaaaggttataaaccacaatttgttcaatggaaaaataaagcaataacaactttcattcaagttaataaacattttgcaaatcgtaaaattgaaaatattcgccccgttgtttcagaattcgtttattttcaattaggtaaaagacaagctgctctgccaaaaggttcaattaaatgggaattagtccaatttaattcatcaccaaaattattatcatttaatgctttccctcatgaagatggttcaactttattatgccaaattatttataaatttgatacaaagcaaaaatggattgttaagaatcgaaatgataataatgttactgaaacagttagagatatggtagaatatttagcttttaatattgatccttataatgataatgtttgtcttgcaggttctgtctttgaagctcctcttgatagaaaacttgaatcaaaattagttgcttcccaatcaaaagcattagaatatatgaatactaatggtgatatatatagatctgaaccaactgatgaagttaaaatgattgattataaagattaattattttaaaagctaaaaattaaaaattaaaaattaaaagttttaaatttttatgtataaagttttccctgtaaatatactattttacattattaaaatacattacttatcgatcattcattgtaggtgttagattcaatgatgcaatatcacccataacactttctacatcagcaccaccactaaaatcttccgaatcaaaactcatgtttttatctctaaacaatcttagattaccatttgccgtatcaacacctctaaaatgaatattagtttccactgtttcattattatttctcaaaatacctaatctttccgatcttaaactattgttagatgatatgtttatactgctttcattttgtatcttttgtttgatagcttcttcgtaaataggtggaggtggtaattcctctctacctgcatgttcaccatcctgttcattattaatcctttcaattttaaacctgttatcactgtattcgggtgggttattttcatccgttggacttaaacccattagtccatcaatagtatctatcttatccatatctttattcgataacattttgtgaatagaatctgatctatttatagatctggacaatgtggcagataataatgatgtagcatcaactccattgttacgtattgttttatcattaggaatcattaatgttctattttcactacaattatatgataaactattacccctagaaatttcccaattgtgcatggataatggtgaagttgcaataagatttgttgtatcacttatggtatttccctcactcatcgcaccattattaatagtattaattatattacttgacattaatggagaacatggtgcaaataccgtattttcatcactactattatcgggtgagctgaaatcattttcagaatttaattccattctcgataaacttttattcatttcaaacattccatgcttaagagcatcatcatatgatggtaaattcattgtttcaggaacacagaatggtgagacaaaaacaattggggtgtcaaccacaacctcgtaatgatgcattttaggtttattatcattagtcttgattttaggatcaggcctactaattctaaaagatatttgtaatctgtgtctgattttcaggtttgaaaaggtagcatctggtaaaaatgtatataaagatgtttcattgttattgcttggattattattcccgttatttatattgttcaaatgctcattagtttcatggtaattgtttttcggagtgaatccttgattgatactatcattgttacttgagaatgaaaaatttcttgctcttctgttaggagattttgaaaatccataatcatcatccgaaagaacttcgtttttatcgtttgaattaactgaaaaaattgacattgaatcattattgtagttaatgttactatttagaccattactgttgtctctcaaacctgtgatatcggaagtacctttacataaattttcataaactgtagaaataaatttggaatcatcattgcaaacaaatgtaagaggacattgtaacttaactggattagtaataacaacatcttcttgaacctgtgagttactatgattactattttgtgaatcattgtgaccactaaaagaaccatctaaaaatcttgacatctttttggatgaatgtaaaaatcctgatgctgaatttttaaaactactacttccatgactattggatcttgaatgagaatggatatgagttttggaaggagtttgtaacagtgaagagctgtaaagttcagattcttcattattataacaaaaggttaataaattatcattaacacaattagcaacaatttctgttttctgtggtacagctctaggatttacaacatttgatggtttttccctcgttttaatttccattaaagtagttacagtttccttagatctatttctcaaacttttagtatcttctgcgagtttgctatctttggggttctttgctgtatatgttattttttcaataatattaatcttgatacgtttgagttgtaaatttttcactaatggaactaacttcatttgtaacataaatgtattattgcgtaagaacttattattcggagatatgtttaaatcttcaggtggggataactgtgtgtactttttaggtaataataattcataatttaaagctttattccaaactttattcacgtaaattgatttattcaaagttgatgttgcatcagatggaggtaatctaaccgaaggtaattgataattataattgtaaacaatactttttatctgttgattttgataattaaaaaaactagcgccactatttgctctacgtctttgatcatttgtagcattggtcatttacatgactgattgatgttgaatttatagatgtagatatacttttattgcgagaagatgatgatgagtttcttctaattccaatttttttgaaaaatgatgtttttgaagaagaacttggagaaaaatttccatttagagtattattaattgtgctactaatactattgttatcaataatattcatatttttggcttctaaatcaaactttggctcttcaaatctatgttgatgagatggtgaagttgataagaatgcagattgtggggcctgtaagttaggtaatggagcaattcctttttgaatttgaattgagaaatcatgtgaaatatttgagtttggagcatatatggactcgctggtatttaaagggtatacaactggtaataggaaaatataataacctggattcaatggttctgattcagtttcggaattagcaaatagatttgattcaacaactgagtcattgatcaatatttttgattctgatacataattgtttggtgataagggtttataatatttaactttttgagttggttctggtgaaacttttgaatccaaatgttttttaatattattcattgaatctaatgataaagaatccgattcgagtgaatcattcagagtggttgtttcattataatcatttgcagatgcgttggtatttgagtctttaaaaggaatataacaatctggattttgtagatctagattccaattgataggggttgaagttctatatctttcatcaaatggttctttcttagaaaactcagttgcattccatttaacatttgcatgtgtgtgatagttgacttttacgatatgattaagattaacttctttattaattttgaaaatgataccaaaggtatgataagtaattccatttccattatctttactgattgattttgttggaaaatcggaaggaatattcatgtaatcattagtaaaatcgatttcattatcatctccgtcattatcatcgtcaacatcattttcattatcgttatcattgtcattatcattatccatatcatcatcattatagtcatcctgaatatttgaatccgtactattattgttattattattgtttctccttttcttcttttgagagttaaagggtagaaacaatatttgaccattacctgttatgaaagtttcaatattactattatttatgattgtagaattgattggggtattagatgatgcaatggtataatttttctctcttaattgataagcagttaatttaaggggattcatatttaaaccttgatgagataaataagatattagagctttattataatatttcaagtttattttggaattagattcatctaaaccagataatgaaagtaaatcatccatacttgtcagattaaaatttgaatttgttgaataatctgaaatacgtataaccggagtttgaccatttgatgaagatttattcaaatgaatattattgatattaccattatttgacattgtacgagaattagataatgaaaattgtttatttaattgagaatgagtattcatagttgtaaattcattaacatttacatgaacattattagatttcggatttaatgttggattggataatgtggcgtaaacctggtgggacggttgattatgaaatgggccctgcaaaccgatatttgaaggggggtgtgacattctaagaaagtgataatgtatatactttcaatactatgatacaagaatggctaataaaagtggtatattgttaataagaaaaccagaaaaaggtaaccccctggaattgaaagaaatagcattgaattaaatcctatacaataatatagcatcatcaggtcctctctaagccgtgataaatttcacaacttctctgacagcgctgagccagaaaaactggaaaaagggcaaagttttatatttccagtggggatgtacaaaaatatttcccagtgaagcgtattacgcagacgggagattggtgggaaatggtgggaaaaatctgttactagtggtgaaattttttatttttttttcaatttgatattaaattgaatatttatcgaatttgtattaattgattaattgattgattgatttaacttataagctctttgttctatacaggtaataacctatctagaaactcaaattattcttatcccaaccaactcgatttgcatctactcggtggaatgcctgaaacaactcaatctaattctctaacaggtctctcactggatttcgatacattctaaaacagacaaatgtgatatatcactatctcatgctcctaaacaatctcatgttatatcaaatgaacactataaaaaggataccctaccccaagagactcgttctaactctaactcaaataaatcaccttcaaaatttacaccttctcctctatcattaccgaaaagattttcattatcttcagtaaaggatagtaacaataataaatcaatacatccaactactaatcaaaatacttctcaaaatatacatccaaatcaaagttttccacataacttccaacagcctctatatcctatacaacagatacctttatcaactcaaagagatcaatcaaatccaatgttacattatcaacaaatgttctataatcctcaaacaggttccatgatgtctttacctgtagcacaatcatctcaatcacaaaatcaacctcaagttatgtatatggtaccttcaaatcaccctatacaatctattaatcaacatcatcctcagcatgctcatttaattcaacagcattctcctcatgtacctcctcaacaacaacatatccatcatgcaccagtttcccaactggtctatatgaaaactgcgagtggtcaattaattcctgttttaacacctgtttcatcagttaataatataccttcattcccaattatatctccaaattctaaaattaataataataacaataacaataataatttcactcaaccaagtaataaacgacaaaaaacttcagattcttcatcttctccaatatctcaatccgctgaacgtttacaaagacaacaaattcaacttcaactccaaagaaatccaaatattaataaattagcagattcttctaatatttcagatatttataatgtagagaataataataataatgaaaatggacctaaatcaactacttcacttggaagaaataatgaaaatgtacaaataatcaaaaacgattctaaaaatggtgaagatgatgatcttgtcgctgaaggtgacggtgatgaagatgatgatgaggatgatgatgatgatgatgcaaatatcgatcaagatgataataaaaatagtaataaacttcatcaagtaactgataacaacaatatttctaaatcccaagttgtatcaaaggaaactccaacaagtatagtctcctctacttccccattatcatcagctaactctgttatatcaaatgattcaacaagctcttcaaaatcatcaaaaaaaatcacaggaactttaacaataggctcgttcacttacaaatacagtcaaacattatccaacaatccaacaaaagatcgtgaattgtttgatagacttgctgaaaatgcatggaaaacatgtatgtctaagagatgatacttctattgctacaatttttttctataactacataaataacctttttttctcctaaaattttgcttctatatcataaatatgtgtaatatatatatttttattttttttgttctttttaaattactacagttatgaactaaacttgcttcattaacaaaatttccccattttaagtcttttttttgacaaacgaagttattttttgttactaatataccaagcgtatacgtatttcggactcagactcatgcgagatgaatttttttcggcatcatgaaaagttggccttcatcgatatcgatctgacagttgtttctttatagaccaatgcgacgtacaggtttaaatagacttatatcgaaaggtataacatctcgtttatttatacagcaaagaagcttctcattaactgaaaaattatattcaaaagatgtatctggatcattaaatagggttaaaatttcattagaggatacacacaatgaagaaactataagaaacatatttgattccccaaaatactggaatgattttaacaagcaatctgatgatgtggagaagaaggttggtcaaaaatctactaataaaggagtgtttaactctttgatgaatttgaaatcagaaaaaggagttgggttattttgcaatccataccttactagtcctaaaggtttgattcaatttgcagaagaaactttagaaagtgcaagagcattaactgctgaaatggttaatgatcaatctgttgaaagtttacatgtatatattaaagatttggataggttatcagatatgctttgtagagtgattgatctatgtgaattcatacgtgtagttcatccaaattcatcatttatcaaagctgcagaacaatgtcattaccaattatttgaacatatgaatatattgaatacttcaaaaccattgttttacaaattagagaaagttttatataataaggaattgaatattaaagaaaaactttcaagtgaagaaatatccgttggtaaattattatatgcagatttcaagaaatctggtattgatatggacagtaaaaccggtgaaagctttgttcaattatcttcatatattgctaatgctggtcaagaatttagtaataatataacagcacccagacaaacatctattaagattgaaaaggatgagtggaatgaaaatgatattaaacctgaatatttaaaacaattatctcgtggatttgatggtagtttatctattccgatctatggtaatattccctttgagttattaagatcgtgttcaaatagtaaagtacgtgagaagatttgggttgctttacatagttctccagatgaacaattagaattactaacaaatcttttaagatgtcgtgaaattttagcaaatttaatgaattgtaataattattcacaatattcacttaatgataaaatggcaaaatctcctgaaaatgttatgcaatttttgaaaggtttagttgatgatttgaaaccgcaaatgctggaagaacttacgacactctataagagttcagaacaaaaggataagaatgtcacactatcagataaagaaattgtaactttgatcaaaccatgggatagggagtatttattaactaaacatatgatttcacaaaaatctcagcaaaatgaagatatatctgaatacttttcgttaggtacaagttgttgctggtttatctaaattattctacgctatctacggtataaagttagttcccgaaaaattgaaaaaaggtgaagtttggtctgatgatgtccgtagatttaatgcgattaacgataaaaatgaaaacattggtataatctacctagatttatttcaaagaaggggtaaaacaccagcatcctgctcacttcactgtttgttgttctagaagacttcaagatactgaattaaatgctaatgataaatttaggctaaaatcattcccgactactgaaacaattgaaactgttgtccaaaataataaaacttaccaattaccaattatttcattagtttgtaactacaatattggtatgaatgatgcaaatatggcttttttaacattagatcaaattgcaacattatttcatgagatgggtcatgcaattcatagtatgttaggtagaactgaattacataacgtttccggtacaagatgtcaaaccgattttgttgaacttccatcaattttacatgaaacatttgctcgtgatgaaagagttctgatgacaattggtagacattataaaactggtaaacaagttccagttcaattattaaaaaaccatttacaatctgataaaattttgaaatactgtgaaacttttggtcaagttaaaatggcacttttagatcaaatataccatggagcaactaatgcaaatataaataatgatttcttcaatgttattgaagtatatcacgaattggaatcaaacttgatgttcttagctgatacaaaatcaacatggccagggaaatttggacacttatactcatatggtgcattgtactattcatacttatttgatcgtgctattgcatctaaaatttgggaaaaactttttaaagaaaatccattttctagagagtcaggtgaaatattcaaaaacgaggttttatgttggggtggatctcgtgatccatgggtttgtctttcaaaaacattaaataatgaagaattagcaaagggtgatgttagatcaatggaaattataactgataataacaaattatagaactgaaatactgaaaatttataaaatctaaacttttatctcatttattttacttctttttaggtgacaatgttgcattttgcaaacagttcaacattgtactcattaaccatattcttgaatctatagaactaaatcgcaaattagatagagaaatatctgtaacactatttgatgaatcttttgtagatccggcaagtagcaataactccgataccaacacagaacttatcgatataacaaaaacaccgcaatcggaaccattagtttgttgtggcgtgtcacgggacatgaatgatgttccaatctatacttgattttggatcccgttcattgtataatacttttgccatatttttcacgagtcgattagtttcagattcattggcttgaaacattgagtcaaatacaaatgcagtttgtgtatatttttttgaatttgacgatagtagttttgcaaatacaaccagactccaatgagatcctccctcggaggacccaaaatcatcattatcattcaatggacaaaaaacgaactgtgcatctgatattccaggcggtaaaactttttcctttacaagctctaatggttcagggtgattagcgagcaagaaagtgaaggtagggtaacattatacaaattggagacacaaatatatctttttgaagcttatcgtcatattgataaaatttagagttaactagtctttttgatagtaatggtaaaataaatccattatagactaaagcataaaaccaagaaattgtactatctgatagccattcatcatcgcataatgtaggtaaatcattgcaataaaatggaacgtcatcaatttgaaatatcactgatgtttcacttaacttttctgtgtttgattctgcagcctcaatgcattgcttcatcagtgttttcaaatgattgattttttgtcttggagataatgatgatgtcgctgaagttaagtctaactcactacttgtattatttttctttctttgttcattttttttcctttgattcttgttacttttggcgagtctcttctcttctctagcttgttttctttcctttaaagacaacttcttccttcttttagcttcttctttcgaactttgcaaattatcttcattatcatcatcatttatttgagtagaatcttcaccttctaaattttgtccatagatggttgtatgagagctcaactccgaatcgtcaatacgatagttagacagttctgtaatatggcacaaacttcgcaaatattttccatattcttgtaagctttcatcttcgtcttcatcatcaaaattatcttttatcagattccaacagatattcaaaacatcaaaaccatctgtcttatattcatcccttttattctttgatttcttgttagcactcttcttgttatttttttcatctccagacaatgaagtcatcccctttctaatatcaactacattagcaacagatgtatcttctattataaaaaatcctttatagtcattaaaaccaattttcattcttgtaaaaatcaattgatggcatatatcaactttgcgaactcatcacacaaaaaatctttaaattcgaaattttaaaaaaattgatttacttcccaaataggaagttaagatcttcaaatttcaaaatttttcatgtatgtaaccttagaaaaattttaaagttgtctatcgatagctataacctcttctttgaaatagaaagttaagtataaccacataataaatatgtccgaatttgacttagaggagccacttacatcaactgttagaccattaaatgactcggttatcactgtccgtatcatcaaatcattcccatttagaaatattagaaatcatgttttccaacatatagatttagcaaatactacaccaaaacaattaatggaattaattaaacaaaccataaaaacagagggaagtcttagaccttatagaaatgttgaatttgatactataaagatttacacacatgcacatggaactaaaaccatgaatcttgtgataaatatggatcatgatgatgattgggttttagacctaaacgatgaaactcattctctttcatcctatggaattgaaaatgaaactgaactaagtgtataccgacgtgaagattacgaagcttaccgtttaaatcctgttgataaatggtgttaatagtggtgtatcaagggtgattacgtaattgctcacgtgatctattattttttaaaaaaaatattaaatttaactaattattttttcgtataacaagattcaaaaactgtggctcacattttccttactatacaacacacagggtttttttttatagaaatttattttgtattatttggcatcattagtatccttttttaataacattcttctccgatatttaaactttcttattgataacattgttatacaaactgttttatcaaaataaatatgcccaacggagaccttgttaaagacccgttaaactatcttcaacgcagttgttcgaaagattctaaaattagtggctcattggatttgagtttaccaaacgttttaactggtaaacttaataatgtcaatgaaaatgttacaaatgatccacaaaaaatgaaaaagaaacattccttagaaactattgaatcaaaagatgggaaaaaattacaattaaaatctgttaccccatcaaataaaagattaaaattagttccaataaatgaaaagaaagcgataaaaaatattttaaatgaaaattatgaagaaatgatgagttctaaccatgatgatttagaagatgttgatcataaatattgttatcgtcataatccaagaattagatgtaataaattagcagatcaacaacagttaactaatattcaaaataaattatcaactttctcaagagaggatcaacaagcaattacaagtgtttggtcaacattctccaattcctcatacgctagaagagctttaattttacaaggtcttatatcacaatgttgttttcctcagttatcagttgtatcacatgaaatttcacatttattaaagattgattttattgatatgttgccttgtgaaattggtttaaaaatcttatgttatttagattgtcaaagtttatgtaatgcagctcaagtgtcaactaaatggaaacaactagctgatgatgatagagtatggcgatatatgtgtgaacaacatattgatagaaaatgtccacaatgtggatggggtttaccattaatggctgttaaaaaattacaagaaaaatcaaataagagaaagaaaaatttaaagtctacatgttcttctaatattgtggaacttgatggctcatcaaatcctgaagccacagcaacaccaaccgcagttaccacaacaactgataatcatcaagattttacaagtccttcattagaacgtaaaaaatcaaccccacaagaaattatgagacagaaaagaccatggaaagctgtttattctgaacgttatacagttgaaagacattggagaaaaggtttttattcattgaaaaaatttgcaggacattcagatggtgttttatgttgtaaatatgataataataaattattaatgacaggttcatatgacacaagtattaaaatttggaatactgatacgggtaatttaattagaactttaaatggtcatactatgggtgttaaagcattagcatttgatgatcaaaaatgtatttcaggtggtttagatgcaacaatcaaagtttggaattggagaactggtgaatgtatttcatcatatcctggtcatagagaaggtgttttatgtgttgatttttttgataaattaattgtaagtggtagtgctgataaaagtataaaagtttggcatgttgatacaagaacttgttatacattaagaggtcatacagattgggttacatcagttaaaattcatataaagagtaaaacattatttagtgcaagtgatgattcaactgttaaattatgggatttagaaacaaataagtgtattcaaacatttggtggtgttgaaaatggtggtcatactgctcaagttcaatgtgttatcccatttacctatactgaagaactagttactgatgttacaaatgatgaaattataaggggcaataataatggtgagaataacttaaataatacaaatattaatgaaaataatgaaaatagacctagtgaaggtttaagcagtagagctaatagtgtaagaaatagagatcatgtacatccaacaaataatgatgaaaatgagattgaaagtgatgttgaagagacagataatgacagtgaatttgataaatttataaaatcacgtcgtaatgttccaacccatttattaactgcatcacttgataatactattaaattatgggatatgaaaacaggtaaatgtatacgtactcaatttggtcatattgaaggcgtttggtcgattgctgctgatacatttagaattgttagtggatctcatgataagagtattaaagtttgggatttacaaaatggacaatgtatgcatacatttgcaaatgcaagttcagtttcttgtgtaggtttaggtgattcacgtattgtttgtggtttggaaaatggtgaagttaaaatgtattgttttgattgtaaagattaattaaacaataaaagtgaaatgaatgatttttaagtgcttttaattgggtggatgggtttatatttatataaattttataataatttaaaattttggaccaaaatttgtcgaaatgttgttttagtacggggttcattagaggaaattttacaaacaacttagttgttatcgtaaataccagttttttgctttttaggtggctcaacatgtatattaaaaggtaggtttttctaataatttataacccggagctattactatcactcgccactgaaaacagctacttgtttcatcaattactagctatcagaagcaccatctaaactgttacgatggtgtaactaactcttcgaagtgaaccataatcaaagtcacgacacaatttttgtcgtgctaaaaagacttcatcttatcagccgcattctgtatatacctccgaaaggttgtttcgataacaaacaagtaatgatatcagtatcaccagcaaaagtacaatattaatattaaattatatacaataaaaaggtattaactgaaaaaaactatgaacggaatagtatatgcctgtatatattatatgggtatatttacatacctctaacagtaaatggataagcagaagcaagattatatagagtaatcaccaatgaaaagacaaatggtatccaagtagtcattctgaattgagcagcatcataaatagcaccaagaacaacaccgactactgatcctgaaaggaatccttggaatgcacctactattatatatccaaaagctgtgataaaaacagtatttttatttcctgaaatgattgaactagtgaaataacttttatatgttggattatctttaaaatcatccacattgactatttgtaaatcatttttctgttcatctactgaaagttgatcatttccattattattgatattattcttacatttaatattttgtcctaatataaaatagtgtgtaagtaaaattattattgaacagcctaaataaagtccagtcatccaaataactgtccaaactgttgtaaacatccaaatatcttgaaatttataaagaaatgaagattcatagtcatatttattagcacctaatgggaagtaaagtgatggaaaattcggtcgtttgtacccaactgggggcatcaccatgattgtttagattatcagtttgttatgttgatttgtgaaaaagccctttaagcaaagaagtattagtttcaagaagagagacatcatatagtctgattgctaaggtgaaacattaaaaatttctagaaaatttcagaatctaagattgaggctggtgattgatttttgttgaggatttactttttcttcgaatttgtgataaaattaccgacaattgattcggtggcaacaatatcatttcttttatctttcttttgaaattcaaggagaattaatagaaataatagagtaaattaaggagcatattaagatgtctgaatttacaattactataaagatgacaggtgattcaaaacaccaattacaagttacatcagatatgacagttattcaactaaaggaaaaaattgctaaagatttagatgtttcagttgatcgtcaacgtcttatattttcaggtaaagttttaaaagataatgatacattagagacatataagattaaagagggacattcaatacatttagtcaaaggtgcggctaaatcctcaactacaggtaatacatcgagtaatactaataatactaccacaactaataataataataataatactacaacatctgttccaagtaatttagaagcaggacaaaatgcatttgatccattagcaggattaacagatgcaagatatgcaggatataatattccaatgccaacaatggatcaattaggatttggaagtgatggtatgcaattaccaccagagggacaaatggaacaaatgatggataatccattatttcaagaaagtatgagatcaatgttatcaaatcctcaaatgttagattatatgattcaacaatcaccacaattaagatcaatgggacctgcagctagagaattattacaatctgattatgttaaaaatttattaacctaatccacaagcaatgagaagtatgatggaatttcaaagagcaatgggaggtaatggattatcaaataatggatcaagtttcccagcacctggtaatgttaataatgaaagtacagaaaataatactagtgcaagtgctagtgctactactaatgctaatgttaatgctaatacaagtaatccatttgcatcattatttggaggtagtaatcctggagcaggttttggagcaggattaggtggtaatccatttatgaatccagcattaaatcctaatttaatgaatttatttggtaatccagcaggagcagctacaggtactaataatactaccaccgatactagaccaccagaggaaatctatgcaactcaattacgtcaattaaacgatatgggattctttgaattcgaacgtaatatcactgcattgaaacgtagtggtggatcagttgaaggtgcaattgaaatgttatttaatggatctgtttagtttagtgtatgtataatctgtattacgtaacccaaagacgcgactgcattacataatcaacataaattatattattagtttaagacactgaaatactatgacgacactattactatcactattactattactattactattactattattaactttaatttaataaagggtgcgaaacccgttttttgctgatattatttatatttactgaaaataaatttttatttttgtttagagatcaacactgctggtagatcgtttatatagattttaaataaccgtttctctgtccaaatttattgtactatattattgatatattctagatattattgatattattgatattatagacaacttaactttatttatataatatattatgtttatgtttatgatcattacacgagtatgtttaactctattgttactgacacgagttataacggcatctgtttcaattggtatggaaataacagagagtaaaaatggtgatagagatttattatcagatattgatttagttcatcaaaaaatgtattcactgaatgatttaaatgatataaaaaattcaaaaattttagatgattttaataatcaaatatcgaaaattattaataattatcttataaataattcttgtttaagattttatttacatgaatatagtactcttgaaaatgtacttaatatgaaaaattcaaaaattaataatggacttttagtttcaattaatgttgatttttcagatactgattttcatattgatcaaaatagacaaactataaatattaatattttagataaagatggtaatacattaagaaggataaataaagtaaatattgataaattaaatttattaatagattatccaatacattcagaaaatttagaaatttataatcaacaatattttgatttttgctttgaaaatttaaaacatgataaatcatggaattcagttattaattcaattttcgcaaaattagatttatcatttggtatggaaactattaaagaaaaatataaagaatcatcagtttacataaatgatatttcaagtaaattagataaaatttatttagaaattgatgcaataactgatcaattagttgaaaatttgaaaacttctgaacctttattaagaaataagaatgaagatacattagaaaaatatatgaaatatgttattataacattaattatttacataattgttaatatttgtcaaatttcttggttaattagatatttaaaatctcatggtttgatataaattaagtataatatactatactaaactataaactttaatgatatcaaagtatcaacccatctcaatttagactacaattcactcgttttatataaaataataataatcataataataataatcacaataaataatgctgtatagaagcagaagaaatatatagaaattatagatattatatagatatagatatcatatcatatatcatcattgtcagtactaatgattaaatcagaattatttgattctgtattaagtttctcattcgataatgatgaaattgtaactttatttgattcatcattatcaaatggtaaatttcttatttttaattcatctttaactatttgtatacgatctaattgattttgaattacattatcattttctttaatacattgagaatataatttaatatcatcttcagttacaggatcaaattcatcatcatcatcatcatcatcatcatcattatgatcgttattattattctcaatatttaaatttatatttctatgaattttagaagcatcaatttttttcttattaattaaattattcattaattgattagaatcttgtaatttctttaatgcaagttgaagttttcgtaaaatgaagtttaactgttcatcagaagattctttaattgcattttgaaattcaggtaattgaattggtctttgatattctgacatttatttttctttttgtttgatactatagaattactgattaataggtttcaataaataaaatttatgatgtaacaacggagtaattaaaattattagtaagattaaagtctcaatgttactttatataaaataaggagtgtaaagaatgagtactgataacaatagaaataatgatggctactacattgcaattaagtcatcattgaaaagaagacttaagaagaagacctaagaagaagacctaagaagaggtcagaagtagacctggggaaaaactgtgataaaatattattgcaaacatccagcggagagactgttattatgagaaaaacgtatgtagtagttcaatttcaatgttacttacaagccctgggcggcggcggcaacggcggctgccccgcggaaaaaaatggatcacgtgataagttcattagccttagtgcattacgtaatagaccccactatcttacaactttaattcgggagaccgaattattgatataatcacttaatagaagataacgtaataaattccaaaattctatcaataggtccgcccataataaaaatttgattatttgttggtccccaaaagataacacgtatggaataaaagcaagattagctactaattacctcagagtactatgaaatgacgtaaaaagtgcccttagaatttttaatttcaattttttgtttcaaagattaggtaatgtaacactgcataactttaaaaatatgtgctaatgcagagtgcagcgaatttggaacgcagtggaaagaaaaactcttgatttttaccttagtgttaccgtgcctggtttaagaaattaaacttttttagctttgtgttgctataatgaccttattcaatatgttgatagtgatgtatactggggtttacatgtgtttatgtgtttatgtatttctgttttatgccaattatttaataaccgagtattccacctgattttctcaaaattaattattaatctatactttattaaattactaaattattaaattattaaattattaaattttttatattaataatatctaaatagatcacagatcataaatcataaactaaaagaaggaataaattaacaatggattcaaatacactattcgattatttaaatacttatcaaaacaataatattcatcttaatctactacataaaaattcaaataataatattattgataataataatccttcatcattcttgcgtcctactttaaataatcttgaatctaattctaatattattcaacaaaccaatacccatacaaatacccataccaatacaaatacaaatacacaaaaaaataattcaatcatgccaataccggactttagaaacactccgagatgtttaacacctttaaatgtcgatttaggtttaggtttgacttcaaataatgatattaaacattcattacaacaacaaacatttattaaaaaagaagatgataatgaagttgtaccaccatctgctaattacttattaagtccttatacccaaagaaacaataattataataataactataattataattataataatcatagtatttcaaattcttctgattatgataatactattaaggaaaaagattattatgttttcaataccccaattaatagtgatgattcattatcaccttatcaaagagatagtttagatagtgcatttagtgcaataagtgtaatgagtggcaacacatcagttaataatgattattcatttaattataatttataattcaaataataacattgaaccaattgatttaaattttaatttaaatgaaaattcaattttagattatgaaaatagtttaaattcaaaattacaattaaatatttctttaccaagtcaatttaataattatattgatcgtgcttttgattcaattaaaattaaaaaggaagaagattttgatgattgatgattgatgatgatattttcgataatgaaagtatgaattttgttaatgataaatttatgaatgatattgatgaaattttatcagataaaagttttaatgattatcctggtatagtagttaaaaaggaagaaaatgatgaaatcgaagttaaagaagaaactgatgatgatattcatttatgtgattgtgatgattcacattcacactcaaatttacaatctaatacaccacaacaatctaatgaacaagaaactgaaaattcaaataatagaattacacgttcaaggaaatcaagtacagttaattcaaagaatattagaaaaaattcaacttcaaattcaaaatctatgaaaaattcaactaaaatagagaaaccatttaaatgctatgaatgttcaagttcatttacgagaaagacaagattaactgaacatataaatagagttcacctgggtaaaatttatcaatataaatgtaaagagtgtggtactagattaagttcaaaggaaaatttaactagacatagtattgttcatacagataaatttaaatgtcaaaattgtaatagaagatttgatagaagttacagataccaaagacacttagagaagtgtcatgtttaaaatttaatgatactacgtattttgtttatttactaattaatatataataataatataatataataaatttacgcttttaatgattataaaaatataataattgtaattgtaattgtaatttaaattatgataatatctgatttgatcaacaataataatttatagtgataaccttcaataaggcagaaatctattgttattatcttatcatcatcatcaccatcatcatcatcatcatcatcatcatcatcatcatcatcatcatcatcgatcgagttcggagttgaccatctcttatcgcggaaagaaaggctagacctcgtctaaaaataaacttcgtatcttcttcaaaaaagtcccagatttatcagataggaacactgtggcgggtgccctaaaaatttactagtcataaatcttaaaatgacgaaacaaaggcagtgcccaacttaaataatgtcttttgaacctcatttttattattaaactattaaactagtgtgaaactttaattacaattcttttgtgaatctttatgtccgaacaatcagattaaacggaactttttgtttttgtttttctaaattttctgaatttttcacttttccttattgaatttcttttttcgatgcattgtgccctaatttctagtttagactaagatttattaactctagttatctgttatcttttattagttcactagcttcgtttatctccactaattagatgttattagtctattatagaaatgttacatatcgttgataattcaatataatcatcgtatcaataacataaaattataaacttagatctttggctgtgtatagtctttacaatctttaaacttcttttcccttccctacatcgtatttttctttaattcatcgtctatctactctacatattaaatgttgatgaagattgaaattctgtcctttcatgtataggatgatcattaggattcggtgcagattcatataaaattgaagttggtaattctttccttggttttaatgcctgtccacgaatctctaatcttgaaattgaaattttaccattcggattattaattaaatcacctaataataaaattgaaaattctgatgtttgcgggaatttacgtctaggtaaatgatgttcaacaattgatgctgaaatttccgctgatggtccaatagttggtggatgttgtaccatatgtgtaggttttgtattatttgcactttcaatatcatgttgttcctttaaataaaattttaattcctctggtggtgatggtgtagtaattaaaactgaaacaagtttaactggaactgtaaatggtattgtaattaataattcaggtccaaaatctgtacataatggtgttgtatttatttcttttgtaaataatttaccaacagttgatggatttactgcattagaaactttaatacgtccaatatcaatatattctaagagtgattgagctgcagtcgttggaagtggtggttctcccggtggatgggtatgctcatggtcatgctcttcatcatgtccatgaccatgaccatgattgtgattatgatgatcttctggcattgttgtatacacttctcctatatccaaagactagtgtgaagtaaactccatcgattgccacacatgcatgaaaagtactgttgcgttatcctataataatggaaatatccaacacaacagaaaacagtgtcatagtaattaaccaaagtgaaaaaaaacgcgtctttacttacttacgtactccttttgtgttaagcgtttaatgaagacgcgtgaagttgtcaatataatattttttatgaacgaacaattttatattgattttattattattagtaaaatattatattactgatcataaattattatcatcttctatttacttttcttttttttaatttgtattcgttcatacatcacatttgataatgaatacgggtatatatggtgatacaagttctgcaattacaagagctggtcttagacaagcagatttatcaactcgtttggaaatgtcaaataagaaaaaaatgagaaataaaactcaaagtgtactgtataacagtgcaatggctagaagtaaaggttcattattagatgatacatcagtttatagtggtaataccggtaatggagatattcaaaaccataatcctaatcataatcctaattataatcataattataatcaaaatacacaaaatttatatacccatcaaaattttagtcagggatatgataatcatggtaatataaatcctaataattatcatatgaactataataatatgcaatatcaaaacaatcaacaatacccaaattataatcaacattctcaatatcctcaacaacaacaaccacatcagcaacatcctcagcaacaacaataccagaataatccaattattatgaaaaagcaaagagatcaaagtaataatagtagtaataaagactcaaattatcgtgaatcttacatgtacttaaatcaatttaataataacaatccacaaactttagcacctaatgcactacaaagaattagtggatcaccaaatttaaatagaagaatatctggtggtaatggtagtataattggatcaccaattattacaactcaagctaagaatgaggaacaagctagaaaaatttcatttaatgcattaatgggtgttaaaaatggaaatattaatgataacactgatgataatagtatgatagatgcaattaattatatgaataaatatgatttaaataataatgatgattgggagtcgattgatgaagaaaatgatattgattataataatgttgaaaatgatgaaactaataatataataaaaagattacaaattgagaatagaggattaaagaaaagattaaaagatattgaattaggtcatgattcaaattcaattgttgcagatgatgaaaaatattctagattagaggatgaatataatagattagctgaaagttatttatttttagataatgaaacgaaagatttaactgtgcaaaatgattcatattttaaagatattacaaagctgaggaaagaattaaatgaattaaaggaaaataataatggttcatctgatgaaatagttttatttactaaaggattgattgataatttaccaaactacataagtaaaagtgatgattttattaaaattattggtgacaaaatacccaaagaattagatgatttatgtacaaatactttaatgaaaattgaaacttcaaagaataatcaatctataaatactcccgcaacaattaaaggatctacattaaatacacctgttatgggatctgcatttacaacaccaaaattaaatagtccaaatcctaatataggatatttgaatgatgaagaaatttctaagtttttgaaagatgaggtaaaacaattaaattttactattaaatcattagaagatcaaatgaataaaatgagaattaattattctactagaattcaagaagagagacaaaccattatagtttcaacattacaaaggaaacttcataatgagtttataaatgaaaatcctaagaataaaaatattggacttaaaaattttagtattattaatataataccacccagtaatgaggataatactgataatgaaaatgaaaatacccataatagcaaacttcctgtactagatttcaataaagaagatacatttatatccaatcttgattcacttacagattcaccaactaatttaagtttacgtgatgatagttcaaatattaaattaagttcattatcacctataactccagtttctgaagcaccagaatctctaaagaaaaggcttacaatatattccacacatacctctgaaagtaatgatgatttttattcaatagcttcaaataatagaatatctgatgattcattagagatagaatttgagacatttactacatgaacattcactacattattgcatatactcaaaataacttgttttatattaaatttaaattataaatattaataactataacttattataatataattaccgtccaatctagttggtttccttcttaactttacttgctgcttcattaactttatcctttgcttgatcctttaattcatcagcttttgcattggcatcagcagtacctttattaatagattcctttgccttacccaatccttcactaattttatcaccaacttcctttgccttatcacctaaagttgaatatgcgtatctttgagttggattgactctaattgctgataatctgaatgaatttcttaacatggttgtatttataattatatttgatgttgtttgtaacagacattaatgaacagttgattcacacggaggaattcatctccttttataatctaccgaatgggacaggattgaaagatcttagagaacgtgatcaacccagccctttcactgtgataaggctacaaatttagttccatatttacattatatacactattacttctcttattctatctctcatatatactacaatccttacccatgtatattattctctaccaaaatctacacaactcattgtggagacaccccagttaacaatacttagacgcgttagttacagcgaattatactaaactcagataaaaattattttctacgatattctccattaaattttcatgtaaactatcagagacccccattttttcattggatgcatcttatcttatcttatttttctttattcttgttctttattttttattcttgctgttgttgttgttgttgttttcttctgagtgctctctttaaacatacagtctttgctaatttccatatggggtactcaaaatacaaatttaatagattatttaaaaaagttagtatagtgagtactcttatactgattttatttattatttttaccttaacatttcatggtagtggtaaatcattcgatttaatagtattgaaaaatcctttccaaaatagcatttcaaaatatacttcattattcaatacaattttagaaccaaaatgtgaaaattttacaacttataatcttgattcaagtaattattggcaatattatggattctctcatcatatgcaattaaatgaagatacactgtcaaatattttacaaattaatcaaaggcaagaggaagaaatatcaagaattcacaacgaattaataaattattatttaacaccaaaatacccagcatttgcaagtttagaaaaatcagtcaatggaaagaatctagaaaataatagaggaattgtttatgtttcaggagaagattattattggttaacaattttatcaattaaatttatcagagatcatatgaaggataaaacaactccaattgaaatttttgttccatttagagatgctaatgatcattattgtaataaaattagtatgacttatgataatgtaaaatgtttatatttttcagattatttaagttggcaacaaatgaaaaaaatatctggttatcaatataaatctttagcattattattgacatcatttaatgatattttatatcttgattctgataatataccaattaataatattcaagaaatgtttgaagatgaaaattatagaaaaactggatttgtttcatggccagatttttggaaaagatcaacaaattataaattttataaaatgtcaggattatcaaattatgcaaatccaatttcaactataccatcaattgaatcaggtcaaattttaataaataaaaactctcatttaaagacattattattatcatattattataatttttatggacctgaatatttttatccaatattttcacaaggatttccaggagagggtgataaagaaaccttttatttagcaagtagggctgttaatgaaaaatcatttgttataacaggtcaaacaactaaaagttttggttataaggataaaaatagtaaatatattggacaaggtattttacaaatgaatccaagtaatagtaataaatattggtttttacatgttaattacccaaagctgaatatcaataatttatttcttaataataattatcaaaaaaataataatataaggaaatggatgattataaggaatgcacaagatgatggtaaaggtataggattttggaaaaaattaggtattgatttagaatttgaaatttggaatttaatgattgaaattttaacagtcgattttaaaggttttaaaatttttaaagaaattggtaatgatgaaatttgtgattatgttaaagaacatgttaagaaacttcagaattctaaattaaatctgatctaataatatacattctatgttataaataagtattagtttttctactttatttcattaatttatagagtgtaaaatagttaaagtggaaaacttccaagaagcgacagtttctgtataatacaatcagtaattaaatttatgcatgaagtttgatctgatcgatagagaactctacttttctcttacttagggtagtatatataggtaacatgaggcaatctattaaacaaatctgtcgacatgttagtagtaagactatattttcacaacccagtaataatttaagtagaaaagatattgaaaaacttacaactagtgaattactttgtaaattaggatttattgcacaaccaaatgcgggattagttcattggttaccattaggtaagggagttttagataatgttaataatattgttaggaaaagacataatgagaataaatgtgttgaagttgaattatcatccatttctcatagttcaatttgggataaaacaaatagatggaataataatgaattatttaaaattggtgaatattgtttagctgcaactgcagaggaagaaattacaacattagttacaccatatttaaatagttataaaaaaatgccatttattggatatcaaattacaaggaaatatagaaatgagaaaagatcaagaggtggtttattacgtggtagggaattttatatgaaagatgcatatagttttgatattggagaaactgaggcattgaaaagttttaattcaatgaatgaaacatatgaaaaaattttcaatgatttaagattaccatgggttaaagcaaatgcagatagtggagatattggaggtgatttaagttatgaatggcatatagttagtgaaattggtgaggatgatattgttaaatgtaataattgtggtagctgtggtaatgttgaaagatcacatagtattaagggtgaagatggtaaatttattgaagaaagtgatgttaaatattttttaagtaaggagaatgaattaatttgtatttatttccccaagggacgtaaattatcaatgaaatttgttaaggaagaagatttagttgattttaatgaacaattgatgaataaagatgagattattaataaatttgttgaaaataatgaacaaaatgatggattagttacaatttttagattaattgataaacaagttggaccaggtaccaaaatgccagatttaccagataatgttaaatttaataagaatcatatgattacatttcaaaagttagatattacagagtcacaagaaggagatcattgtgatagttgtaaagaaggtacattagttaatatgaaaggtgttgaagttggacatacattttatttaggtactaaatatagtaaaccattagaaggtaattttattgataaagataataagaagaagccatattatatgggatgttatggtattggtattagcagaattattggagttattgcagatattttaagagataataatggattacgttggccaaacattattgccccaattcaagttagtattatcaataagaatactaagaagaatgatgatgatgatgttaaatttgaagatactttagttaaggaacttcagaataagaatattcgtgttgagaatgatgatagtgataaaatttcatttggtaagaaattaaataagagtaagatgattggtgttccattacaagttattgttggagttgatgaaggaattgttgagattgagactcgtggatgtttattcagtgaagattttaggaaaattaaggaaattgaaggagataaatggggttgggagataatttcaaaatctaatggtgaaaagcatattgttaaaaaagaatatgcatctaaggtaattgagatattattaaaagacatgtaaaaagtaattgtaatcataataatcttatcagagattagatatagtatagtatatagtatatagatttagaaattatatatagaaattatagatatagatatatagattgaatgaaatcaatatattattataatttgtaatttattagagattttttgttcatatataattaaaagacagaacctgaaatttttgcaagaacatgtaaaagtacaactgagaagataaaagcaacggcaaatacaagaacgattaaaggatcaattttaaaacctgaagcttcatcattgaaaattctaagcattgaagcagaggacccgccttgacctgcagctctagcagaatttggttgattaagagcatgttgtttagccttattatcggaagcagcctttctctttgcaagggttttagctcccccagggacagcagttgaagcagacattgttgttgttgtaagagaagatgctgagatgtagattgtagataagtgtaagatatacaggtggtcaaattgaagaaaatggacgagagcgtgaaatttgttctttggtgcgacatttttcgttgttgtgggtgggtagaaatattaatggggaaaattcaagtttttgctgttttattagttgtattggttattaatagagctcttcttttgtttctgctggtatatctcccactgtagagcttatacacactggttatggagtctgatgaacaggagctgacacccgtattggcctctctttccttggtggacaataatgacgctaatacttccacacccgctgctatgactaatgatattagtattaacaatgatattagtattaataataacaataataatactaataataataataataataatgatgacgaccttattcctactgctatagttattaaaaatattccatttgcaatcaaaaaagaacaactgttggatttcatgtctggtttatcattaccacttccttatgcctttaactatcatttcgataatggagttttcagaggtttagcatttgctaactttaattcaattgatgaaacttcaatggttgtatctgttcttaatggtagagaaattgatggtagaaaattacgtgtagaatataagaaaatgttaccattacatgaaagggaaagaattgaaagagagaaaaaagttaagaaaggtcaacttgaagaacaacatagatcaacttctctgacatctctggcttccctatattcaatatcttccgctcctccttatttatcttcaaataacttaaatatgaatatgaatatgactacaaataataatatgactaatattaacaatatgaataacaacaccaacactaacaacaataatatatcattaccacttaattcattaactttaaattcattaaatatgaacgattttgatattcataataataataatggtattataaataacaatatcacttcaaatcaagctcatagtattcaaagtattcaaagtattcatagtatgcaaaatttacaaaatttacaaaatttaaatacaacaactcaaagtatacaaagtttacaaaatttttcaaataatttaccaaatttttcaagttttaattcattttctaataataatatcaataacaataataacacaagcacaactaataataataacaataatagattaatttcaacattctctacatctgatcaattattacaattaccagcggaaattaactttaattctcctgaaattctaacattttacactaatttagtcattttcaaggaagatattaaaaataataatttatctactcatgaattaatttataattatactttgctacctgaaactttgaaaattaattcaataaaattgatttgtgatctgttagatttatcacattcttttgaaaataatttattgattataaaaccagatgaatttaatacaaaagctcaaactactggtggtagttcaatcttcttcaatacaagtaccacaaataataccaataccagtaataatgctaataataataatattaataataataacaataatgccaacaacttaaatttccaaccttcattaattagatcccaatctcataatataaataattctcaattatccaataataggttaagacaacatccacaatcttcaagaaatatatcacaaaatcaacaatatacacaatcatcactaggtttattaaataataataatctgaacaataataataattcttcaaatttaaatagcttgaatttaaacaatataaatagtacaattaatgccaataataatagttcaattccatcattacaacaacttcaacaacaatctcaacaacaaactaatcaattacatcattcatcatcaactgcttcattaaatgtattaagaaataaaggtttgacaaccccttcaactcctataactccaagacaaggtacttttaatacaaatcttaatacattatttaataatacaagttcaaatatgagtaatacaatcaataatacattaacatcacaaatttctaatcctaatacatcaaataatttattaaatccaccattaggttttaattatcctcaaataactggtggctctaatataagtatgtcaactaataaaggtttggatgaattatactcaaatattgattacttatcatttgataattcaacaaattgaatattctttttacttttatcagcttctactataaaatcaacctttgttttctttccacccccttttttatgaatatattatacgaatatgaatgaatgaaaaacctatttaacgactataaacgtgtttctattatcttatataatcttctattactcttttactttataacattaacatgaatatatgaacatgaacttcaaataataataaactgtaataacgtgttcgctatataaatttccagtggcatatctcaacatgattattgaatttacattgacttcacacattctaaattgttaaccaataccattcaatgcattgggcaacgaaagttacaccattggtgttatttacagcattatcgatttaccttcgtcattataaaataggtgataatcattcaattatttgggatgaagcacattttgcaaaattcggttcatattataacaaacatacattttatcatgatgtccatccaccattaggtaaaatgttatgtggattatctgaatggattgtaggttttaatacatcaaatagtaatgttagagattatgaatttaagagtggatcacaataccctgatgaaattaactattatggaatgagagtatttcaagttattttcagttcattgattatacccgttgtttgggatacttgtttaactattaattattcattacttacatcaatattgattactttattaatatgtttagagtcatcatttattgttttaggtaaatttgttttattagattcatttttattgtttttcatggcaactacattttggtgtttaactaaaatcaacaaacttaaatttaaagaaggtaaatcttttcaatgtgacgtttggtttatattgttaggaattagtataggttgcgtatgtagtattaaatgggttggactgttttttacttcagttgtcggattatatactattttcgatttatggattaaattttgggatgttaaatttagttatattgaatattttaagttttggattagaagaatagtttctttaattattgtgccaagtttactttacattttattttttaaaattcatttagatttactttatttacccggtgatggtagtggttcaatgaatacattatttcaagctaatttaagacaaactgatattgtaccacagccaagatttgttcaactaaatgatataattacattacgttcacagggtatgaattcaaatttattgcattctcatggacatatttacccaagtggtagtagacaacatcaaattacaacttacggatttaaagactcaaataataattggagattattaaattctcatagtaatgataatagtataacagtctctaagtttttaagaaacggtgatataataaatttacaacatattcatactggtggtaaattacattcacatccaataaatggacacatatcgaagaacttctacgaagtttcaggttatggtgatggaacatttggtgattctaatgataattgggttgttgaaattatttcacaattacattcatcaaattcaaaatattctgatataaatgaattaccaggtaatgatctttttgagaactatattcatcctgtttcaacaacctttagattaagacatgagaaattaggttgttatttaggtacaacaggtaaaagttatcctacatgggggttccaacaaggtgaagttgtttgcctaagtgcacctaatttagattcattatcattatactgggatactgcagctaattggaatatagaatcagttattgaatcaaaattaccagttgataatgattattcatatccaaaatctaattttttcaaaaattttatacaacttcaacgttcaatggcagcttcaaataatgcattaactccagatccatctaaaaatgataatattgcatcatcatggtgggaatggccactaatgaaaagtggtattagaatgagtagttggtcagcaggtgttaggaaatattatatgtttggtaatccattgattatttgggcaacaactataaatataccaatcttcatttatttattattttcaattctaatcaaatggagaaatcaaacattatctattgatgaatattcattttggaaaatatttattacagctattattccattattaggttatatttttaattatttacccttcattattatgggtagagttacatattaccatcattatattccatcattattttttgcaatatttatggtaggattttcaattgattatttaaccatacgcttgagtgcaatactgaaaaaattaatctatcttgcattatacttgattattatcacttcattcttgttatttagtcctacatgtttaggtatgattgggccatctaccaatttcagctatttgagttggttccctacttgggaaatcggaaattaccaaccatttactgattccgttcactctttcattctaaacattaaaaaaagcattgaagaggttttcatttcccatttctattagacatttatattaaatatacaccaatgtataactaactatacgggccctcacagtaacctattatcatataggattacatcatcgtaaccgttacacaataagcaaaagccgataaaaaaccatcgttcgctgcaaattggtcaaacgacaaaaggctttaagtgttgtaattgatctaatgtttttacctctttaatattttctttttaacttttcaaatcaaccattatcctggtctctatatccatgagtgctggcccatttgtgagaatggtaataaggaaatatttcttattgtctttacttatcataggacttctatattcaactattagtgctttaagcaggtctacctattccgaaagcttagtttataagttcctaaatctacaaaatgatttatctcctctgattacaccacatgaagttttcgatgaatatacaatttcaaaaaaaaatgcattgacaacgatatctaattcaatatacaataaattatcaaatccggaattagcaaattcttcatggagatttactaaaggtttgatcaatcataaacttgatgaaaatattgattcccgatatattgaacaatatttacagaaaagacaaactgaacatttctatgatccaagaattacattggctgtttatttgaaagctctaaactcggcatatactgaaggatctaataaaataccattctcatgggaagattggactgatttatcatatttgaatgaatttttgaatgatgataaaaaaatttcatgtgcagatttcatgtctaattttgatatcaaaacaaaatatgagatagatccaacattgaaatctagttcttatttgaatcaaactttttgtttagataatgaagagtatttaaagacaaatgatggtaaattcagagataataaattacttccaggatttaattttcatcaaaggattgatgagaaatcaaattttattggtcaaatatataatgcaaaatcatatcttttgtcatatgcaccaccaccaacattcatttactttttaaatgataagggaacttattataaagcttctcctgttcaatcaactaatatgattgataatggaatgcttgaaaactttaaaaatacagattcatttagtggatttgatccaattaaggaacaaaaaagtatgaatactaattatatatcacataataagaatgattttgccgttcttttgaagaaaaataagaattttctatatgaagtcccagaaacaaagtttgatttgaactatagtgaaacattccctcatatttttacaaataatgcacaagatctttcaactcatgaattattattcaaagaatctattgaatactcagattcaatattggaagaaaatttacataaatacttcaaggagatcaatataatatttcctgcaacttattcaggtcataaattaacagagagtggtgctcattatgattcaagatttttctctggtttattaactgaaatgccaaagagtaaatatacaccaaggtcaccacactatgaaaaaccacaaacagatgtgtcttcatcagatagtacactcaaaagaagatctgtgattttatcaaatatgattcatacgattcttacgacaactttccatgaaggattggtgatgattcctgctcatgggtcacttttggcgtggtattttaactccggtacatttccgtgggacactgatgccgatgttcaaatgccaattgaagatttagcaactttttgcctcaacttcaataattcaatgattgttcaaaatcctagatatggtacttcaaaactctatgtagattgtactgacagtttgactcatagagttaaaggtaatggtaataataatattgatgctagaataattgatgttgattctggagttttcattgatatcactggactttcacttacacatgatcgaatatcaaaaggttacttgaataatattaaaagttggttaccaaatgttgatgtgaatacatatcctcatgccgaaaaagtatcatcaactgttggtaggacaataagacaaaaacctgtctataaacctaaaaccccagctgaaatagaaaaagataatatagcttatgaaattcacaaagaaaatagattatacaattgtagaaatgatcattattatacttatgaacaactttctccattaagattaacattatttgaaggtgcacctacatttgtttcatctgagagcaaagcatataaatttatgttaggaattgaatataaaaagacatcaatgtcaaaacctgttcatgacatgtatgttttcattaaagagttagcattatgggtacatgcagatgatatttattatgcacttttgaataatggtatccaaatcaattcgaaaatgaaacaaagtgctttaagaagaagaaagaatgttaaaggcgcaacagtgtttgaaccttatagacgtaataaggctatagttgtttcagaattagtgaacaactctcttttcgaaattacaggtgaaacttcatttcacagtgaaaattatagaaatccaatgcttaatattattgaagaagtatatcatgatagagtttatacagctgcacatcaaaaggaaatggcactttttgattacagttggcaatggaaagtcccttcaatcaatagccaagtcgacatttcaagtgattggaaaagattaggtcaatggatgttagaagaccacccacctaagaaaatgtcatattttgattatttgatatccacggaaaaagaagacaaggaaaaattagaaataacaaaaactgaagatgatagtaatgaagatgtataaagcatttgttaaacttactgtatttttaaaattttataacttttatagacaataacaaaactacctaacgagtttcataaacgaaaaatgttaacactaaaccacctaatataacattaataccaaatataattgcaattgatgcaatatcccaaccaattgcattgacatcaaatccaaatgttgataaaataattgcacctggaacttcaatattcaatccgaatttcttttcctttaaaattaaaccattaacttcattaacagataatgattcatatgcataatgaaatactgataacttttcaatccatgataatccgaagggtatactatctttattaatgaacaaaccagcaaataaaagagagaaaagtaataataaaacagataaaatggttgcagatcctgaatctttgaccataattgcaataaccataacttccatggcagttgctagattgaataaaataaatgcaccaattgcaatccaaaacttgtatcctgacatatttaatccaaccagtggataaataattgccaataaaataaccggtggtaaaattcttaatggtaaaacatcacaaaatatcttagagaaataataacttaatggatgataataattatttgatctttccctgacaaaaacagatctctcttgagagaatgagtctaatcctgtaagagtactgaatccaaataatgtcaataaaaagaaaaacaaacctaatctgttttgaaatccactaattgtattttcaacattataatataagtatgaacaaaataatcccattaataaagataacaagtaatgtccaagtaaaagttttggatttctatatgagtttttaaatgttcttgaagaaagaatgataaattgatttaaccaattagccttagcaattctattatcagtttcaaaaaataatgatgaagcgtgtgatatttgttcatttattaaagcaataacagaaacagaaatatatgaatcagtaaaaagagctgctaaattcttgtcatttcgggtgataattttagtaggatttaaagttttaaccaattcatctctatgtgacgcataatgttcccattcagatacctcattagtttcgatattaggatcattgttatgagtatgttcacttgttgattcaagatatgattcaaatttttcattagtgatatcaattaagtaatctgcaatattataaccgatcggacaattaaatccaacagaagcaaaatactttggacaatctcccatttcaccagtataaataacatcaccatcagataataaaaccagtttatcaaataatgaaacaatattacttcttggttgatgaattgtgaagataatggttctattgtaaagtttagcaagtctaactaaacattcaacaacattaaatgcattataaccgtctaaaccagatgttggttcatcaaggaataaaattgatggagaagttactaattcacaagcaatagcgactcttctcttttcaccaccagatatacctctttcaatacctgaaccaattaatgcatccttgatatgagatattttaagttcagatagaatttgtaaaacttttgattgtttaacagcaaatggcatagaattaggtaatcttaacaatgcactattaagaacagtttcataaacagttaaagtaggaatcataatatcatcctgattgacaaaccctatggaatctttaaatatctctttttcagttttggtagttattctttgaccatttatataaatatcaccggttatattaccacttttattctttcctgctaaaatatctaataatgtcgacttacctgcacctgaactacccatgactgccatacactcaccaggtttaacacaaccaaatgcattattcaaaatcactttattgtcaatagagtaagatatcttattgaatgaaaatgtagcctttttatattcctctaagaccaaatctgtattattattatcatcactactataatcgtcatcatttaattttattgaagataagaataatggagatgatttaactctatcaaacaataaaagaacaacaaccattgaacctagaagcacacttgttagcttagtgaaatcaattaaagtaaattttcttttatcaggtatttcaaatcctggaatttcagatttatgaacacattcacttgaacgacagaaaagattaatttgaggatcaccgaaaacagttgaaattaaatcattcatacttggttcactaaatttacaattctgggatgcaatatcacaagtaaaatctgctgggccttgaatctcatgagttaaaaagtcagatatatcaattgaaccattttcaccacataacattctaccaggtaaacaactacattgagcatcttgacatttataatgagtagtatttgcatttaaatcatattgaaaatcacaagtagacagatcacaatagaaactttccttttgatcaatccagaattggaaatcacaacgttcagaagttttgttacaactgaaagtaacttgaggaattttaccatcaagaattttcaatattttgtcgtttgtaacatcacacatttgattaaacttattgataataataccagatttataacaagtacctttcaatccaacaggtacaaatgaatcacaaacttcatcattttcacacatattacaattaataccaccccaaccatcattacattcacaagttgcattttcttttctctttggtctatttagcccatcagataaaccaccacatagaggaattgaacaatcatcaccaccaaatccacttttacactcacaatgaccagtgaaaggattacaagcagagaattgtgtacatgggaaattaggtaaattacaattaaatgcaggtggacatttttcatcatcatcattaccatcttcaccctttggttttcttataggtataccattgatatcggattcaccatcattataactgtttgattgatagctatctaaatttgatatgtaatcattaatacttttctcaagttgattaatacggtcatctgtaaatcttatagcattggaaatatgagacagactcaccagtgatactataagtcctttaatgtgcatatctactcaattgacaaccagatgaatgatattactgtacaaccctccaaaacagagccaccgttgaatgaacctcagcaatttcaattgacattatcagaacaaccaaaaacaataataattagtatgttacgtaataatatattttcgagggacatgtgtatacaattacgtaatattttttataaatgtctgtacactattacaagtaaatactcaaatttggattagaagaaatcatcaaggttcttagaattttctgcatggatgagatcaaccataccagttgggaagattggagtaccctcattatcaagtacatatctgaaaggcatttcagttgcttcatgtttactgaaacgaatttcaggataatcaataaatttaatatcttcaaattttgtttccttttcaaggataatttgagttgttctaacagctgtatcagttgtcatttgtaaattacctaaacgacgagttggacaatttaattttgcctttaattcacctgtacgatctcttggtggatgatcacctaaaataccaccaaatataaaatatttaaattcatttgcatcatttggttgtaaatcaatttcagctcttggatctaataaacataattgatccttatttgatacaccattagtttcagtaagatatggtacaatatcttcagttgtccattgtaatccaagttctattaattcttttggaatatcagattcagttgtaccctttggtaatgaaactaaaaaaagattttccttaccaacatctctaataatttgtgaatattctaaaacaacccatttagtgaacccttgttccatatgttctataacgtatttcattttttgtgccatttttgctgatatatattactttactattagtaaaaaagagtgtactagagatacctacacagacaacattatatatataactataactttacacaagtaaaccttccatgacatcactttccactgagtgaaaaaattttatagtgagtgtggaggctcattatgaattaatatcattcatacgatctttctctgctttccttaagatttcaagtaaaagatcgaagtttctaatcttgtctgctgtcatccatttctgcattactagagaagattgttcagatctctttaaaataaaatcacatatctgcttttcatttattatactaacatttgatatatgttgcgcaactttaatctcttgaataatcttctcaataccttttaagtttttagatgatttgttcatatggacaatttttaatattataccaggttgagaagtttcaatttttaatccacgtaatattaatgctaacatcgtcacactatttattactgaatatttatgtctatattgataaatataggtacgtaaataatcattaagtgataaagataatactttgatagctatacgatcctgtgttaaacataatctaatattattttcataaatttcattagaatttaaagaaattgcttctcttaatatagatgcaaattgaccatatttcattatttctttaaaattttctatccaatcttcaaacattgatatatgtctaagtttcataatacgtccaagttgtctcggacttaaagttgtatcatctgaacaaggtaactcaaaacatggtaaatcatcacaatgtcgacaatatgattcgaatttgattcttgcttttttctctatttcatcccaaaattcatcaacattggcctgtaatgcaaacttatcctgtttcattggtatatttatagttaagtatgaaaataggcacaaactcaaaagaaagatgaatgcctgttgtaaacctatataaagtgttccaggctatcttggatgtgatatacagaatgaaaaagaaaaaaaagaagccgacgcacaaatcgacgcaacgccaaaatagcttaacagttacgcgtagaggaagaaaggtcttggaatttaattttttaacacttttaagggattaagtactagctattactgctttttctgtctctccggattgattctttactcttttcatttatttgattggcacacaggtaatttagaatgtctgtagaacaacagaagaaaccgaaacaactaaaacaggcttctttgatgtccttttttggaaagaaaaaggaaaaatcagcacctacaattattaaaaaagatactaatgaaactatagattcaataacacctgataattcattgaatgatattgcccttaaaaatgatacaaatgatacctcaattcagaaaaaatcaaatgaattcttacaaacacctaaatcattgaaaagaaaatcaacaaatgatttagatattcttaaaaagaatattgatgaaattagtgatgacaaaaatattgataacgaagtaactacttcaaataaagatattccatcgtctcctgtctctcgtagatctagaaaagttaattattcagaactgtctgatgatgatgacgaggatgaaggtgaagaaggtattaagaaagtaaagaggagaagagtgattgcatgggatgatgcagatgatgatgattttgaaattgatttgaaagcagataaagcaaaggattctgatgatgacgatgatgaagatattgtagacacccgttcaagtaaagaagaattattagaattgacagataaaactacaattgatgataatgaccaccatgatgatgatgatgttgtcgtagatgtacgtcctgttaaaaaacaaaaatccgtttctcctccttcaagaaccacttctaaaatatcaaatattttagcaaataaaccagtaatgaagagctccctaactccacagaacaaatttaacaaagaaaatgaagaacgttaccattggttagtcactgttaaagatgctgacggtcatttagaatctgatcctgattatgattcaagaactttatttattccacaatccgcttggttgaaatttactgcatttgaaaaacaatattggacaattaaaagtaaaatgtgggatactgtcgttttctttaaaaagggtaaattttttgaattatatgaaaaagatgcagatattgcacacacaaaatttgatttgaaactggcgggtacaggtagagctaatatgagattagcgggtgttccagagatgtcatttgattattgggctaaaagatttattaattcaggttataaagttgctaaagttgatcagaaggaatcattattagcaaaagaaattagacaaaagaatgatagttcatcatcatcaaaggaatctaaagttatccaaagagaattagaatacgttttaacttgtggtactttaattgatgaaaacttattaaatgatgaaatgtctaaatattgtctagcactgaaagaagttgttgattatgaaaataatactaagcattttggtgtctgttttgttgatgtttcaacaggtaatttccaaatactagaatttaaagatgatcttgaatgtacaaagcttgaaactttactatcacaaatcaatccaatggaaattttaatttcaaaaaatgaaatcgattcattaactttgagaattttgaaattcaattcaaatactaatgcatcctttaattttattagaccagaggaagaattttgggaccatgaaaagactgttgatgaactaagtaaattcaatacaattaatgaactgaaaacacctgaaattttgaaaaaatattatgaaactgaaaaatatcttgcattttcatcatttggtgcaattttctggtacttaagatctcttaaattagataataatattatttccatgggtaatttcagtgagtatgatccatttaataaaagtttattaagtttccacgatgagattagatggtataacattacaaaatttagaaattttcaataattcatttgatcaatccgatagaggaacattattcaaacttctcaatagaggtttaacatctttcggtaaaagagaatttaaaaattggattattcatccattattgaacaaggatgcaattaatgatagactagattcagttgaactattacttgataataatgagttgaaagatttgattgaaagtaaattaaagaaaataattgatgttgaaagaatgttaactagaattcattctaagattttaaaaccaaaagattttgttaaagtaattgacagttttaagacaatttctggacttatcaatgaaatcaataaatttggtattgataatttgaagggtttgtttaaatcaattattgttaattttccaattttagaattagatgaattattagagaattggaatgataagtttgatagaaatttggccattaatgaaaatttgattgttccaaatccaggagtcgatgaagaatttgatgaaagtaatgctaaaatatctaacatagaatcacaactcaatgatttattacaggaatatagatcagcttataaatctaatgaaatttgctataaagatagtggtaaggaaatttatcttattgaaatacctacaaagttagtcaacaaaattccaagagattggttacagatggcagcaactgctaaatgtaaaagatattggtcccctgaagttaaagctttagtcaaagaattaatggaattaaaagaactgcataaaatgatttgtgttaacctgaaagatagaatctatgagaattttgataaaagttactccaagtgtattaaaatcatttcaagtattggtaaaatagattgtttattatcgttaactagatcatctgaaatgatgggtttcccaatttgtcgtcctgaaatagttgaaaatgattattcatttattgatttcaaacaattgagacatcctgtttttgctgctggttcaggaatattgaatagtaaagattttataccaaatgatgttagtttaggacttggtaacaaagatagaattggattattaacaggtgctaatgctgctggtaaatcaacattattaagaatgacatgtattgctacaataatggcccaaatgggatgttttgtaccagccgaatccgctaaactgacaccagttgattctataatgacaagattaggtgcaaatgataatattatgcaaggtaaatccacattttttgttgaattattagaaacaaagaaaatgttagataatgcaacgccaaaatcgttagttattttagatgaattaggaagaggtggttcatcaagtgatggttttgccattgcggaagctgttttacatcattttgctactcatattcaatcgattggtttctttgcaacacattatggtaatttaggtgaatctttcaaaactcacccaaaggttatacctttaagaatggctattttagttgattctgcttctaaaaagattacatttttatataaattggaaaagggaaaatctaatggttcatttggtatgcatgttgcaacaatgtgtggtatacctattgaaattgtcaataatgcagaaattgcagcaaataaatgggaacatacatcaaaattaaacaaaatgaaaaatatcaaacaagatcatggtattccattaggattagaaagtgattttagttggtatagtcaaaataaaactgggttgaatgtcttcggagagaaatttaccaaggaatcactaaagagtgtatttaagatgattgatagcttataatagagagatagtttgtatagtattacgtaataaatgaaatgtagatcaaaaatatagaagacatgtttttttttttcagctaaggtttgacactttgccattaaagatctgagccgtttgtttgcttttgacatcgatgtccaacacatcattgagctttattgatgatataacggaatctgagtcagaaatagaaaatgttaatagtgatattgaaattatagatgaagttgtgaaaagaaagagaactttggaagattcaaatattgcaaaggttttgaaaaaaagtaaacttgatccaattgaagatatgtgggtgaatgaatacacacccgaaaagatatctgatgtttgtgttcataagaagaaaataaaagatttggagactgaaatacaaaatttgataaataagcgtgacggaacaaggatattagttgtttctgggcctagtggatgtggaaaaagtacaagtgttaaaatacttgctaagtcaatgatggaaacaagattaaatgctatacgacgaatgatgatgagtagtgaaattggtgataaaatttatgacaaaaataatgattatattgttgaattcaatattttaaaggaatctaggttaggtaactccactgtacgttattttggtgaatttttaagtcaatgtaaattactaactggtataaatgagaagtgtgtcattgttgaagaactaccaaatttatttcataaagagacacttttttattttagaaaagccatgttagactggctaaatactgattcacaatatagattaccgccattgatattttgtatcagtgaatatgacattgcaaatgatgatagtaattggaatggtggatttacattggataatacattcaaagttgaaactgtacttgggtatgaggttatgaaatatttagataatggattgaggagaatcctgtttaacaaagttgcagtaagtttcataaaaaatgccataatacgaatcacacaattacgaaggataaaaagagatagtattgttaataataaaataactgagattagtaaattaggtgatttaaggaatgcaataaatactttcgagttttggtataagtttcagtatggtaaagatgggtttggtgaaggtgaagatattgaaggtaaaggtggagttttagatattttccattcaattggtaaagtaatatatgggacaaaacacgaagaagaagaatgggttaattttcaaaaacgacataatgttaaattgctaaatacaacacaggttagtaaatatgctattagtgcagataccattagtagtgagataatgagtgactgtcaatggattcaatttaagtgttcttgagaactatcaacatttaaatccgcccatttgtgaagaattaaataaaatgatggatataatgagtttaagtgataatatgattacaatgggtaagggaaaagggagatataatgaaaaatattgcattttatgattgttatgggttacggaatgtttttgataagatgaaaggtaaaggtagtagtgaaaagtattcaagaaaaatgaatttttcaagagataagaaattaaatagtagaaggaataaaacaattaaagacattcaagagtttcaagaaatttatcattctagggggatattttgtagtgataatattgctaatttgattgatgggtattatgtttcaattataatgaacagttttaaattacgtatgaagatttataataaaattggggatctgaaagttggtaaaattgaaagagttggaggggaatttaataacacaattgctgttagtgataaattagttgacgaaattgctgatgctgttgaagaggttccagtaggaggcattaaagatttgaaattgttacaagatgcttattttggtgcagttgtggctggagatgatgaagatgatggtgaagggtacgaaatagattctgatccgattgaaaattctgatgaatgtagtgaaacggatcatatacaaaataaagatgacgatgatgatgaatttagtgatgattcattagtattagagatgtttgagtaattaaacatatacgtgtgtaaatataatataaaagcttatttactatttattattatttaaaaatttattataaagaattaattaattagcagattcttgaagagcatgttcaaagaattgatcatcatcactcaagttttccttaataatatctaatccaccttggaagacaccattaatatataattgagggaaagttggccaatcactgaaagcttttaaaccttgtcttacggaatcatccttaagtatatcaaagaatccaaatcgtacttgatgttctcttaagattgcaatcatttgtcttgaaaacccacattgtggagcagatggagtacctttcataaataacattattggagcagcagttgttaatttttctaatcttgcgtttaattgctcaggagattcattagattcttcatgaatagctgttgtattttgatttgtagtaacatttgaattggtatttgaattattatttgaaggttcttgtgatgaagatggagatgatttaaattgatctaaagcagtaacaaattcttttggatcagcacctgttaattcttttaagattgtaccattttgaataagaacaaaatacggaactgcagttatatcgaataaatcagatatttctgggaatgtatcagcattaattgtcaggaaagaaattgaattatattcagcagatgaagataaagtatcaataactttattcatttgaatacaaggtgatgcccatggagtatggaaatataaagcaattaatttatctttaactgaaggttaattctgagaattggtctttacttgatatttcaattaaggtcattgttggtttcttttgttaaagttttttgttgttaaaaagaaaaagatgatgatggttaaagatgtaaatttaaatgatttataataaattaatggttttacggatttaaacataaattttaagtgaatttttcaaaaatgagaaaaacatgctcgaattgggtatgctgacagataggtctcatgtgattggctctagaatcacactgtggcttgggtattactaattataattttgttagtaaaggtgtatacaaatagaatattgtatcaacatgattttagagagtatataaactaaacataagtgtgaaaacaacatagtaactgacaagcaactaaaacgtatatccagtagggtgtataatattcggaaaagatgcctcattgggtgaaacacgataagaattttttaactatggtgaaaattagcgataagcattcttaaagtggttatatccgcaaactgcgacaatcctgacagagggtaatgggtatataaagacctggttgttctcttgtaatgtgctctagagatgaaggtttgttcatcaattgaacagtttgttacatagtatatacatatagaaaatggttaaagttatttcatgggaagattgtggattaccagttgcatcaaagattttagatgctgcaacaattacaaaatctggtttaatttacacttcaggatctgttggtatgtcagctgatggtacaattcctgaaagtgttgaagaacaaactgaaatttcaatcaagaatttagaaattgtcttaaaggctgctggcagttcattaaacagtgttgttaaagctttagtctttgttagcgacgcgtcttatgttccattagttaatggtgtttatagtaagtatttcataactaaaccatcaagatcttgtgttgttgctgcaatgacttcaccagctttcaaagttgaaattgaacttgttgcagaacttgaataatatatatatatatatatatatacgaaagtaaaaaattatataacattataatattcattattatcttcttgatcataataaaattcttcagttggctttttacgattatttgtatcttcctctcttggtacaatatcgattaaaaaatcaaacatatcagatttttgtaatgcagctgcaatatcagatttttgtaatgtacgtcgtttattttcctctgcatgaatccaagctctcattgtaagttcagtaatgaaaatatcacaaccttttgcaaataaaattggtgcttcagctgatatcattttaacttcatcatcagttttcataacttttttaattctagctaatggtaaatgatgatttttaaaatcatgatcatctctctctattgcatcaatagtattttgccaatattgcatcatcatatttttatatttaccaactaatccttgtccaacattagcaaatgcacctgatggattatcattatcatcctcaatatcttcttcttcattcttcgtcttcatcgtcttcttcctcttcatcatcctcgtcattcatcttcgtcattcatcttcttgttcatcaacctgtacgtctcctacaagatcattaggaccatgttcatcattactcagtccttcaactgcttcattaagaatattatcattatcatcatcatcatcatcatcactatcattatcatttccaatatttcttaaatcttctctcagatgatctatattatctatatcattttcattaacatcaacatcaacacctacatcaacgtcaacatttacgtttacattaacatccacaccatctactccattctctaattcgtcaatatctcgatcttcttctctgatatccatattactaaatgaaatttgttgataaattaatgatgataataatcaatctgagtgactaagtttcacttcaagtccatggaagaaatttttaaattccgaaaacagcgaaattatcgacatatcagattccagtttgtttatggattgttctttttagtgaagtagtgtagcaatactttaacaagttgttttggaatgaaaataacagtgttttatgtgaattattaataaaagtatcaatgttttgataaaactatcataaactcctaactttgaatacttacgtaagatttgacatacttacatatcaagcaaatggtagcaatattacgagcgtaacgttaaaattgaattaaaatttgaaaagtgtgtttggcaagtaggagagacatgctatacatcgttgtttgtacacaggttcattcttaagaaatataatctatgactttccttcaatttactcaattttgaattactattaataacatcatcatcattataatcatcattaagatcctcaatattcatcacatttgctggagattttcttaatcttatttgtgaattatgcattggtaaaccatttttatcaaaataaacatcgattccacaatgtttatatttcatttgtcttgtaggtaataaggtaacataatctcctttatgagaaactctaaagtaggaaggagtattttttgaatgataactattgtctagattattataattatcattagtattccaaatatcatccatccaagatgcaaaaaaggtattaccaattttaggtgcaccaaaagtaataactgttggatttaaacctaatggtaaacattcatttgcaagaattggagcaatagcacctcctaatgaatgaccagttattataattttgtaattaggattttcttgtgataaatttattaaatcattaaataaattatcataaatttctttggctccatcataaaaacctttatgaattgtacacccattgcaagaattattatatttataccattttttccatcctttctttctttgatttaaaggatgataaggaattggaaaaaatgttaaattcaataaccattcttcatttgatgttgtaccttttaaacttaaaataatttcatttgaattattatcttgaattaaaatacctgaaactttaccatgataaatttttataatttgaatattaatttctgaatcttcacataatttacaagtacaagcatttttcaattcacctaatgaaattgaatcttttttaattgagtaagatactgctgcatattttgcagctctagacattgaattgaaaacatcatcagataatgaatttgaggatattattgtggaattgatgaataatgcatttataaatgttaaaaaaaggagtattgttaatgagtgtttaagtaattgcatttgttaaagccttttgttctaagaggaagaaggaagaaggggatgagaagaataaaagttacaaatggaaaatttcaagagtagttatagaaattagtgttttcatatcaaaacagaatagaatagaatagaaaataattgtaattgtaatggagattgaaattggaatagaacatgaaaaaagttgagccccctaataaatatgatggttacgtaaagcttatcttaatacatattataagaaaaacacttacataagaaataaaatatttgaaaacccgatagcaaccttttaatatattttaattaactatatatatatcatcaaaggaatatgccacatccatttgaatcatttacgccaagtacaacagctagaggaccaatatataatgcaccagaagatttattagagattgaagttacaaatccaataacacatggacaaccaccacaatatacagattatgagataacaacacgtactaatatacctgcatttattggaaaaggtaataataataatggtaatacaccatttacattaacaactaggaaaagatattcagaatttgttaaattaagacaacaattaagtgatagacatccacagatttcattaccaacattaccaccacctagtacaatgtttaattacagtaaaaggttcaatagtgatttcatagacgatcgacgcatgggattggaaattttcctaacagcagttgcctctcatccacttttacagaaggagaatgacgttcttatctcttttcttaaacattgagtgggtgagtgggtcgatcgacctttaagttaagtcatttattatacggaatccgcaccccggagatgcatggggtgatatttttataaaattacataagctagtaaatactaatactactaatactaatctctattgttaaaatattaaacaccccctcatttagaaatagaaaccccctatataaatcatttacattgcggaccagttatctccgtaatggcatgtaatacttactttaccttacgtttaccttaattttaccttaattttaccttattatcacttgccgtcatccgataaaatacattattaacacatgttttaacttgttgacatcttgacatcactttatctctccatttacattttatttatctcaattttaccatttatccttaaatctctttaattttatataagcttattttatgtctataaaaagaactataattcctacttttattcaaaaaataattattctttccttttcattatatttctctatactatttatttcttactttcctttaaacaaaaagaaattaatattgctatattaattaattaaaataattatgtctgaaacttacgaaattcctaaaactcaaaaaggttgtatcttctatgaaaatggtggtccaattgaatataaagatattcctgttccaactccaaaaccaactgaaattttaattaaagttttatattcaggtgtttgtcatactgatttacatgcttggaaaggtgattggcctttagatgttaaattacctttagttggtggtcatgaaggtgcaggtattgttgttgcaaagggtgaaaatgttacatcttttgaaattggtgattatgctggtattaaatggttaaatggttcttgtatgggttgtgaattctgtatgcaaggtgctgaaccaaattgtgcctaaggctgatttatcaggttatactcatgatggttcattccaacaatatgcaactgctgatgcaattcaagctgctcatattccaaaagatgcagatttagctggtgttgcaccaattttatgtgccggtgttactgtttataaagctttaaaaactgctgatttaagagcaggtcaatgggttgcaatttctggtgctggtggtggattaggttcattagcaattcaatatgcaaaggcaatgggtttaagagttttagcaattgatggtggtgatgataaaaatgaactttgtaaatctttaggtgcagaatattttgttgatttcactaaatcaaaggatgttgttaaagaaattattgaagcaactgaaggtggtgctcatggtgttattaatgtttcagtctctgaagctgcaatttctcaatcttgtcaatatgcaagagttttaggtaaagttgtccttgttggtttaccagctggtgctcaagttaaaactggtgtctttgaagcagttgttaaatcaattgaaattaaaggttcctatgttggtaatagagaagatacctgctgaagctctggatttctatacaagaggtttagtctcttctcctttcaaaattgttggtttatctgaattacctaatgtctttgaacttatggctcaaggtaagattttaggtagatatgtcttagatacatcaaaataattttataactaatgagtttttttctacttatataacaatataacaataatgaatacgattaaatttaaattaactaattaaatgaagaatgtaatacttctaagtatatcgaaaattagataatatttttctcaacatgaaaaccaattccctcatcattattttttttatccgatttctaactacacacctacttttcttttcctaagacactaccgaaacatggttgaattaaacgacgatacaaagttaacgtttcgtaaaattgatgatccaaatgatacatatttcgaacgtatattaaaatataatttccgatactcatcaccaaatttatttatttggggtccattagctccagctcatgatgctttattaccaagaactataatggcaagattacaagtttcacttggtataatattaattggtgcaacattccgtagattcccatcaacaacaggtaaattaaatagaatttttagtagaggtacaagttttttagctggtaatgcattattaattacaggtattagagaaatttcattttataatgatccattatcaaatcctttatatattgaaattcaattagctagagaattatctgctttaaatcctgataataatggtaaaccaaataagggtaattattggtttggtccaaagaattttatgccaatgacaaataaacaatattggcaaatggtctattcattagaagttaatgaaattttagctgatcaatatcttaattgtgatttaattaatcaatataataaattaattgaaaataaattttctggtgaattaataaatttaaaaaatgatgaattaacgaatagaatatctgatattataaattctaaatcagatttaaaaacagaaactaaagttcatccaaatactttaattaattcaaatgttaaattattcaatgaaaaactatcgaaaatttggattaaagatggtgttaattctaaaactttattattttggtcacaaaataatccattcgatacattacaattaatggaatataaagattattattcttatattttcccaagacttaaatttcaaaaaaaagaatagtaaaaagtaaatagcaatgtaatttgttatatatatattatatcatatgtaaataaagaactgaataatatagttgaataattattaatatagtaaaaatctaaatcctagtaatcctaatatcttctgttacctaatggagcattattactaccactacttctattaccaccaccattaccaccaaatctacctctaccacctctaccaccaccatatctacctctaccacctctaccacctctaccattaccacctctattaccccattgtctcttatctaatgcttgtaattctggtgtaacttcttgttttgcttcacttaaaataacaattaaatcatgagcttgatttgcattatctcttgtgaaaagtgtaattgctgtaccctttgcaccagctctaccagttctaccaattctatgaacataatcttcaatattacttggcatatcaaaattaataacacatgtaacacccttgacatctatagtaaaaaattaatcaaattaattaaatgttagtattttgtttcttatctttttgattcattttacaatcattatactttactttctacaattttttacgggcttatttttaaagagatcaattaaaattacttctctagaataaattttccttcatttttttccaaattaattatattagttaattttaaataatttcattatacgtaagatattgcaaaacttataaaagattcattccctcaggctgacccccaatttgaatgcaatataataccttttctaaaattattctttcataaactaatatgttctcattgatactaattaaactttttttttcaacgaaccccatattcgtttactgtttgttagtttaattagctccacttctttggaagaaaaaaaaatatttcttcaaaaaaaaaaaaaaaaaaaaaaaagaaaaaaaaagaaagaaaaaaaacattcctattcttaattcttattattcttatttcattcttgtttgtctattatctgatcccactctaaaaactaagcctgtaataatttatccttctattggaatgattgaatattgaaaagaaaaattcttcaaagaccactctttgatatatttcaatattcatcgataaaatctgttagtagtagtaaaataaaaataaaatcctaattgtttaatacataccaatacctcttgcagcaacatcagttgcacacataattggagatttacctgatctaaattcagatagaacccaatctctttctctttgttctttatcaccatgaattgctaatgcaggccaaccttcacttcttaaataacttgttaattcatcacaatttctctttgttgaagcaaagatgataatttttgaatcttcagttttcatttcatcttcaatatatttaggcaattttatctcttttttcaaaatcagttgtaacttcaacaatttgtttaatattatgtgatgcacttaattctaatgaaccaacattaacttgaatataatcattaagataatctctaactaaaccttgaacagattttggccaagttgcagaccacattaaagtttgtctatcaggtctaatttgatcaacaatttttctaatttgaggttcaaaacccatatctaacattctatcagcttcatctaaaactaaataagtaactcttcttaaattagttttaccactttctaacatatctaataatctaccaggagttgcaatacaaatttcaacacctcttgataaatctctaatttgttgaccttttggaacaccaccatagacacaagtatttctaattcttgaagttttaccaaatttagaacattcttgttgaatttgaactgctaattctcttgttggagctaaaactaaaacaattggaccatcaccaggttttaataaaggttgtgcattaatatgaacaattgcaggtaaacaatatgataaagttttacctgaaccagttgctgcaataccaaccatatttctacctgataaagccattggccaaccttgacattgaataccagttggtttttcaaaaccttcagctaaaacttcctttaaaacataatctgggaaaccagcttcagtaaaacttgtaattggtcttggaatatcatgaccttgaattgtcatttcattttgatttctgaaatcttcaatttccttttcacttctagctgtaacagctggatcttccttatagaaatttttttcaaatgttggtaatgaaatattattccaatcttgcttttgtaaattatcacctaattctctatcttctctactaaatgagcctctaccacctctattgaatccaccaccattattataaccaccattgttataaccaccaccatttctatcatctctcccaaatctacttctatcaccaccaccgtatgatctataagagcctctgttatcgttttcgtaacccattgttaatataattcgatttgctcaaatgaaataataaaaaaaatagtataccctagatagtaaaaaaaagcaggggaaaacctttcttttataaatgaagaaaaattttttcacgtatcaatagataaaaaataaaattttttctttatgggaaaaagaaattttattacgtaagttttagtattagccattggtattactataatgttttgtataccattttagtaactaaattttgatcagttgcaggataaagtacagtaattaattatatctataaagtttatagtttatctagagaatattaatcattaaatagtaaatagtaagtaatagtattcattgaaaaactgaaatttatggttcttccgtactataatctttatttgcaacttttgtactaaaaacttcttcaacatgagaacataaattacttaagtcttctaaacctttatgaaatgcttcaactgctgtcattttaccataagtttgaattctgatatttaatttattttcacttggatgtggaattgaataaccacaaaattcaacatcttcattcttcataatcatgtatcgtaatgcattacctaatgtatgatcttcatcaattatttgaaatgatgctgcaaatccatcacttgttgctcctggtaacaattgaattttactggtatcaactgctaattctagattttcttcattatttgcttcattcatttcaatatcattagttggtgcaataactggtttactctctgtatctgccattatgtatgtttattatattctattgtgtttatcctacaatgttacaacaagatcaaaatacaattattaattctttacaaatttttcaatgccaaaatagaataaaataaaatgaaataaattttatcctcgcaaatttaataataaatacatctctcggaattttcattactatacagattatttatagagcataatatcatttagtcttaccacgacctctaatacctttattcaagtttttatataaatcagaaaagtaattcaacagttctctctcattctctggtaagtcatcaattgattgattattttcacccatctgtgcaagtttactaaataacatattaattgtattaaggtgaaatctattttgatgtgcctttaaattacctaattgtgtgaaacctttattacaaccttcaaatttacaaataaatggtttgaaattttcatgagttgaataatgtgcctgtaaattacctttcctactaaaacttttctcacaaatttcacatttaaatggtttctcccctgtatgtaatctcatatgtgttcttaaattaccaccttgtgtaaaccttttatcacaatattcacatttatatggtttaactcccatatgtgatctaagatgaacatctaaatgtgtagtttgggtaaattttttatgacaaaatttacattcataatttttggatcttttaattgatgttttctcaactcctccaattaattcaacatgatttggtagaattttattacttatatgtgccccaatttcttctaaattatctttgatatctttattattatcattggtattagctgtatcattgttcgaatcattggtattataattattttcactctttttattattattatctttactgtgatctttatcttcatcaatgtttccgcaaacaccattttttctagcttgaataatcaacataagttgatcaacttttgttgcaccaactaatggtctaccatcatcacgttttaatgtttctggtaaattagcaattgcttcaatttcattcatcgttggtataatcttttcaaccttcttctttttattgctattaatattatcattatcatcaacattatctgatgatttcttcttatccttctcccttcgtttattattcttggtcgattctttatcttcaaaagagtttgtcttattattacgtttacgttttttaataattggtgcttttccagtttcttcaatcttaacattattctcaatatcaccatcttttttgtcatcaacttccaacattttagtatggtagatatcaactggagttccaacttctgtaattggtgtagctattcttacagcatttgatttaatattttgtatctgtggttgttgctgttgttgctgttgttgctgttgttgctgctgttgttgttgttgttgaatcatataatgttgttgttgttgttgtaataattgatattgtaatgattgttcttgttggtattgttggtattgttgttgttgttgcataaataaatgaggatatgcttgatgttgtaatgttaatggatatggttgtttcatattattattatcaatataaactatttgtggtacttgttgtgataaattttcaggtggtatactttgctttggatcaatttcattgttatacgggaaaaaatattggttcaatgagttactactatttcttgatcctactcctaatggtaattgaaatattgaactatttctagattttggtctacttgttggatttttaaaatcatttgatacactatttgaccctggttgttgtagctgttgttgttgttgttgttgttgttgttgttgttgttgttgttgtttggatattatttgcaatggatcaagtaattcattattgctatctcttttcaaaaatgtgtcaatttcacctgcagtataatcatttgggaaataagcagctgatggaaatcttttgaagaaaaaactattttgtcttgaatcattagggtgattacctaaaatatccaatgaggggtttgaaataattgaatttttattaatatttgataaagagttactattacttgtaattgaacttttatttagattagaatttgtatttgtacttgtacttggatttgtactagtactagaaactacatttaaatttgaatttaaattcgatggaattttggatctatgagatttcaaattagtttgtgcaataaaaggatctagttgttcacttaatcttctatttgatatcagatgatctgttgtaaaaggttgagcaaatccgaaattacttaaactacctcggttggatacagatgatgaattatgatttaatggaattgcaaaataatcttttggtaattcttgataatttgatgaatccgtgtatgtataaccattgttgttattattatttatattattcagattagtttgatcaaatgaaaatcttggcaatgatgaagagttatttaatacagctgagaatgaaccattggagtttattgttgtattagtatttgaaattgtatgtgagttggaattagatgcagaatttgatcctggtataggtggtggtatagtgttggtatttgtggcattattgttattattgttattgttctctgtgttaacgtttttattggtggtagtatttgtattggaattggtattggtattattattgttattatttcctgtactattacttctattattattattcaaaccggtggatgtcataaaaagattcaaatcttgtggggtatttggcatagaggatatatcagataatggtaaaacagaattccttcgacttacaaattgattatttggatcttcaaaaattgaattaagtcttgttataggttgattatttgtataagaataaatcatttgattattttgatttgtaaaaggtattgaattattgatttgattatacagatgtgatggtggaggtggatgtgcaaatacttgagctgaatttgataatcgtgtgctattatttgttgtgtttaaattatttgttgtagaactagtacttagaatattatcactattttgtttatgaatattattattattattgttattattgttattattattattgtgattaccattgtttgagccaactatttttgaattactattatcaggattgatgttattttttattttatttgaatctgtattgtttgatttagaaatgatatctcgattattgtttaaagccattctttcagatgtgtttagtttatcattattgtcattgctatcatttctactattatcactattatttgatgaattaactgcaaaattactatcagttattaatcgtatatggtcactttttatttcatggtttttaggtacattattattattattatttttattattattattactattattattattattattattatgagtaataatatgacttgtatcatttgaattatctttattagatattatattatcaataaggtcattattgttagtgataatattatttgagtttgtattattatcgttatttttagtattcttggtatcgtagattgaatctttgtctgaagaattatttgttttctgttcatgttttgtaagtaagtgtggattcaacattatcttaatattatattgattcaatatttatatcagggtaataacatagaaatcttagatatttttcagaaatatacagagatgaaatattgtgtcagggatgggatgggggtgtgattaaattaaaattaagattcaaattttatcagtactagtagagatatttgaaataattatatgatataacgataatattttataagtcgtttaaaatatcagttataaaattaacgatgaaggggaatagaaaaagaaagaaaggaaatagtaaagaagcaaatgatgaatgttaaaaaaagaaactcaaaacaatttgatgatgatggatagtgcaaaagtttgaaagtaaatatttaatggttacaatagtttccacaatatatgagacgaagaataattttgtaaagtttacctgtagttgtggtgaataataataactgtaataataacaaaattgatggacataaatagccatcaatgggttcacatcagttgtgaataattattatacattaatttattaagctacaattattattattacaattatatgtagccataaaaagagcttgaaatagaacaatttaaagaaatgggcacggtcgaatatatgctttacagagatattgtgtttatcatatatacgttgtttatttaataagtgggatgtgtatgtgtattaccctgtgtacagagcaatatcgatgatttacaatattacatcgaaatattaatatacagggaatggaagaaaagaggataatcatgagtataaggaataattttttttccattggtaaaaggttaacaatgcttctttccacttaaacaatagattctattgttctcttaatgtcttattagtacagtgtattactcaatcgattacttaattacttaattaattacctaatcatttacttaattgcttgtttacttaagtgattcattctctataattcatttaaaaccctcattttctgcctctccggtgattcattggattatacttcaagtatactttctatagttactatcctattattaattaaaattagttatatacacacattacaattattacaaatagcccctgtagcattatcccctatatacacaaagcaacaatcaaacaatcaccaattatcttacataaacaataggatacggtaataatataaaaattattatttaaatacgctaagatttcctattatagtaatgcctatctccaacatgatgccttagtaatgattaattagtaactaatatacaaggactccgaatttcatgcatcacatgacccctatttgttagcttcctcatcccatgcactaccaaaaagcagttcatctaacataccaataccttcagaacttgaaaatctactaggtaattcaattgttgtactctcaactatattattaccgtttccattattatcagtctcccctccactcaatacatcattagttccatcatcagataatacattgatgggattcttatctgtttcactttgataaactgtagataatcctgatggaattgcattacttcttgtagttttctgattattattgttactagtctcataattattactattttcagcaccgctactattattgttgttcatttgatcaaattttctatttttctctaataatataccattatcacccgtatttgatctatcattcatttgaccttctttcacatatgaaaataatcctagtgatggttcaaataaattatctcctccatttttatcttgtctattatcactatccctaacttctccatcattattactattattattcaaatcattattaagcatatatggtggtaagaatctaccaaagatcttcatatctaattgatccattggtccttgaacatatttatattctgtaatatcattaaatccattttgcttttcattcttcttagtaacattttcaccactgttattactattataattaatatcaactatatcatttaaatcaatatcattaaaatccatattcatgttcatattcactggaatattcatactcatattattatcattgttagtattaccagtattattcatatttaaatcaatatcattaatatccatattcatttgcatattgacattattaacgttcatattattcatatccatattacccataccataatataaatgactcatattacttggatcaagtattggacttatggatttaccactctccattccaagaattggttcacttggctttgtatatttaacaggagtagtcatattaggatttttgttagtaggggtttttgcattgatcttagtattggcattggcattcttaggtgttattgcttctttattattagtattattatcccatttatttatattgttagatggtgatacagaagttgatgtattgttattagtattgttattattagttttgccattattgttatagctatttttaccgctacttccagttcttgcagttttcctattcagttgttcaaatactgcatttaatatattatatgttcttctagctgccatactactatcttttaaaatatctaaaacttttttacccttctctgcatctttcttaattgcaatatattcaaaatctaatttaccgtttttatttaatgatggtgcaaaatgaacataataaactaaacatgcaactgagaaaaaaattgtataaattgaaaaccagtatgacccacttaacatatttttatcaatcatatcctctgctaatttaacaacaactcttgcaacattaatacaatttttagcattttcaatacatgttaaatcattatttgaattactcttaaaattgcttgaaatataatgaataaatggtctatataatataatcttaacatgcaaatatgatatatgtaataatctattggctttgatatattcttgtggtggttcaattcctggtttcagttcaattggtaaactattcatccattcttgtaatttaagttctaaatcataaacaaaattatttctaattgattcatgtttagtcttattattattaccattggtattatcatcaccatcatcaatatcttcatgaatatttagtcttttcttaggtttaattggataaagtttagtaacaacttctttcattaaaaatattaatctagtatgtgcatttgcaatacctgaacttgataatctatcagttttgtttatcatatctataacatgtaaccgttatattttcatcagtctaattcttctggtaaatcttgatcaaagtcatcagaactaatagttctaggtaatcctaacattgtgttaacataaatatccattttataaattgtccagaataatctttttctaatctctaattcaattggattaaatggataatccaatttcctatgcagtccttctcttaatgctgctcttaaggcaattccgatatatgcataacatgttgaaagtcttgccgaacattgtaaaaagataatcaacattacaatcgtttgaataccgtaagtatccctagtatctgtaatatcaattagtttacgagccgcaataaaatatttataaccttcatcatcaaagtctttttcttcaataaattcattactattattattattgttaatattttcattattattaccattaatattattgttttcattatttttattattatttttaaattttgaatctgttgtatttctatcacttttataaaacagagcaccacacgccataactgaataaaccaatggtaaaatctttgttgtttattagtatattgagttggatcagtatcgtataattcatttaaatcttcaataaatgcaactctatgataaaatctaaacaggacacaagcattttcccatgttttagtaattaaatcaagtgcaacctctctcgatggtaaaataattttaatttctctacccattgttgattcgattgaaccatcgatatcttgttgtagattatttactgtggatgctctcttaggtaatggaaaattgacggggatcattgatttgttgttgttgttgtgatgatggtgattgagattgtatttgaggttttaattgttgaggttgaggaaactgttatttgattaggtggtaatttagttattggaataactggtaatggtatatcaggtaatgaatcataagttttagcaatttgtttacttgtcggtcttgaagcatatttaccagaatctcttaatttattcaatgcggacattaatttcattggattaattggtttaggattatcattaagatccgttaatttgatttcaggtaaaagtctatgtaatatatcatcgtataattttaaacgatctgttaatttagagaataattcaggatttgaggaagcaagtaaagaaaccgttgatgaattgaatctatccattgtattactactaacatcagatggtggttcatttgttagtgtattcactgattttagtatgacttgtggattagaattatttgagggattattatttgtaggtgttgtacttcgattgtttggatccttgaattgagtttcttcctttttaataatggttcccttccttttggatttattaggttgatcatatgtacattcataattataaacagtacaatgaatacaaggtaaatcacctgaacattttattttcaattttctacaacgatcacaagctctgacaactcttctccttttctgtgtattattagattgtaaatattctggtaacattatcatctttggaggatcctttgatttaataggtaatgaatttagtggatctaatgatgatgatggttgttgttgttgattcattactaaatgtgacgaagacaattctaatttgacatgtttatttaatgttgaagttgaacttaaagattgtgtagcttgttgtatcggcacctgttgctgttgttgtgcatcttcctcattctgtacctttctcttcgccatattataccttatgcagttgacttattcttctctaaactaaataatataatcactgaaattattaatgaatcatacaagtattaatggtaataatagatcggaattcgatcatagtaaattttcaactaaaattcggacatcggttccgccatttccacgaaccgctattgggttcttaaataaggtataggtatagatgtttatgagttgggggtggaggattactctacgattcgtatatataggtaggatatactgtattgtatatatatggagtaagctattgcagcttttctcttaaatgtataaaccattggggcagaagtcgttcctgaggaatttgaactgatatagtggtaggaagtagtatattacctgaacaaccaccacgtaaaacttgagttctatcagtacgtggttgatacatggtccatttaagacttttcttatgagattctcttgttctattaaatgaatccagtgcattgggaagttgattctttttacgatctttatgtttcttctctgccattttcaataaattcatgggcacctgtggtgatgtcgatatagataatcgatccattgattctgtagttgattgttccttattagaggatccaataggaatagctaatgagtttgttgagctctgatcgtcagaagcaatgttcatattggatgttgaccttgttgaagttgatgaatcacttgatactgactccgtcctctcaaatattattggaactttcacatcctctgtgtcttcaatgtgaggaatcagttccacattgattaattcaagaaatatttcaactttataactcattcttctagcaaatagtttatattcattaaaaatactactgtaactccatcgcagaatacatcttaaaataccaattataacatcacttgtatccattatcaaacaattgtgattttccttgtttaacattatcatgaatgctttggaaatgatacttggtcttaaaatcatccattcttgaaattttacattgttattggaaaatgtattaatatatttattattatcattattagatgctgtaatactagtattatcattcgttataatattaccatttgcaccctctccaccttcttcctcctgtaatatacttgaattcacaatatgatgtaactgtacattattttcctccatatactgtcgtactgcacgtggaggtttctcctcgttgatccacacaatcgatttaagttcaagagatttaagaaacggtatattgatcccatctactctagaacttctgtatataccctcctccaccaatgcaaaatgttcaggaggtactaacatggtgatatatcctataagagagctattgtaaagagaataaactccaaagacctgtacaacccatataataatttgaagacttccaattttaccataataaaatttcacaaagagactcgcttgctgcagtatagaattcacatgtgtttggcctttttgttgactgtttaccatttacatacgttttcttatctggaattttataggataacactggcaaatgagtgggaatctcaatatagcattcattcatcctgatttgggaattggaggagctgaaagattgattgttgatgccgcaatggcattacaatctgctgataataaagtttccatctatacctcacattgtgatccaactcactgctttgaagaaattaaggataattcattaaaggttacagtttatggtgatttcttaccaactggtatcaatggtaaattcaaaattatatttgcattccttagacaactctatttgacaactaaactgatattaacactgaaaatttatcaatatgacataatcattttagatcaattatcctattgtattccgttgttacatttatttgcatggaatactaaaatcttattctattgtcattttcctgataaattacttgcttctcatggatcacttattagaaaaatatatagatttttgtttgatttgatagaagaagtttcaacatcttattctgacaaaattcttgttaattcacaatttacaaaatcaattgtaagaaaaacttttactcatatacaggctgaaaatttagaagttgtctatccatgtgtttcagtaagtgataaaaataccactagttccacatacccattgaaaaatatcctaaacgaaaattcattctttttatctattaatagatttgaaaggaaaaagaatattcaacttgccattgaatcattctctcaatatattgttaaaactaatgataaatctcaatctattataattgcaggaggttatgataaaattgttgatgaaaatgttcgatatcataatgaactacaaaaactatgtgatgatttaaaactttcacatattacaattaacggtaaagatttaaataattttaaaccattaccaaatgaaactgcaaaagttatctttttaacatcaatatcaacagatttaaaagattcccttattgaacaatgcgatttacttttatatactccttcaaatgagcattttggtattgttccattagaggcaatgcgtatgggtaaattagtattagctgataatactggtggtccattagagacaattgttaattactttgatgataaaaatgcatttactggatttactgttgcttcaaattttagtaaatgggaagatatacttgaatttgtcaaaggtttgtcgaatgatgaactgactaaaatatctgaaagatgtaaggccagagttgatgaaaaattctcattcaattcattgaagattcaattagttaaagtttgtaatgaattattagaacaacctacagatacatctcaattaattattacacatttattagttcctattatttcggcaggtttaatattatacttatataaagttatatttaattaaaattaacttattcagtatcagaaactattgcttcttcagtatttataccattttgttcaacactatttatcacttcttgtaatttctttttagttattgggtattcaatcatataatcgtatatacctgtattttgtgaatctttataatatgatgttagagcaaccattgttgcattagtatttaaagaacttgtatttctgattaatttaactaaatctaatgaattaagcctttgagattctgttgatgtgaaaataatatcaaaaatgatattaccactactcagtttaattagttctgatccacttgcacatgaaaatacaatacatcctaattgttttagatcatttgtaatagaatatctatgaattggaattggctcaaataataaaactgttaaagtaggtaatgttgacttcatatttctaaaattatgtggaactttggtagatgatgatgatgaaaccctatttcttgatgcattggatttacgtatcttggaaataattgagtttctttcttcattatctgatgatgatggagaaaaatcactcagtgtacgagtgaaagatttggtcaaaatgtgaagagcaggacttgacaaactatctttcttattgagtttattattggtagtagaacttgacgaaactgagtttttgtttgaaagttgacctgtatttgatttattattattggtattggtatttccactattagaggtctccagattcaaacttgcaaatttattgacaggagacggaataaatgataaaattggtgattttagattacctgtaatcaattgagaatttggtgatgatgagcgcttatgagaagttggcatttgaggagcacgacctcttgaaacaccagtcagtggagttgctggtgctgatccaacaccatatccagaacttgaagatccagtggattgaggaacatatccaccttcggatgatgcaattgatgaaatactatttcgatgttctaaatgttcagattttaacctattaattgcatccttgttctgtttttctaaaaccattaaatttctaaattgaaatgatccaaattcggaactactaccagcatcgtttaatcgtgaactacgtctttctcttggtgatgctaatgcatgagtctttgagaaactttgtcttggtgattcaatagtgaatgatgagctagaattagaattacttgttacatctcttctcatcttgtaacggttatcattcatataattagtcgtgggacaaaaaatttcttcttcctcttcttcatcttcttcttcgttctctaacacctcttcatcttcatctccaacagcaatatcatcatctttgataaaatcatcttctccagcctccatttcaagatcaccagtatatccattatctttttcatttgctggctttgcataatcatcaggagagtttaaattatcgtcatcgacgggaaatgaattcatagttgcacctcttgcatcaaaataatcggttgactcaggatcttcaacttctggtacaaatgaagcatcttcatcaaacaaagtatcccattttattccttcaaaatatttatgttccataatttcctttgaaccgccagatcctaatcttttagttggatccttaattaatagtttttcgatcaaatctttggcatttggggaacataattcatcaaaaacttcttgacttacttcaggccattgaatttcaccatataaaatattattaaaaactttttcaggtgttgcatcattaaatggaggatatccaaacaaaaattcaaaaaatatacaaccaatggaccaccaatcacttgatttatcttgacccttacctgaaacagtttctggtgctaaataatctggtgtaccaacaaacattcttgttggtttagattccgatggatcaaaaagtgcgtatgttttaggaacttcaatagactgagttgaggaatctgggtcaattttagttaagaaattttgagatttactattttgactggtagattgtaaatttttgttatttattggcgaaagcagtgaaacatttgagctgggattcagactattttgtagttcagatgatattgaattgatagacagtctacttgcagatgagagagtacgtgctctagttttatattcttgttgtacattttgtggcaagcctaacatagaaaatggagctggttcattttttaattctgaaggtgaagatgtaaagtaacttttgaaatttccatctttaattggagtttctggggagttcaaagaaaatggttcaactggtagtaacttggaagtaatagcatttgcaggtggaacatttttaaatggctcatcattattgttagtcgtagaaaatgagccagcacgaaatggttgcccactaaaacttccagcctgggaagaagttggagtccctccaattgatcccattcctggtgctcccaaacctgagatacttttgttacttgataaacttccatgggtactggccaaaccatttccttgtgataatgaacgagaatgtaattttgaatctgtatatttttcaattgttctttgacgattgaccaaacccattctacttaaaccaaaatcagttagcttcacatgaccccaatgatcaatcaataaattatccggttttaaatctctatgaacaatacctttagaatgtaaatcatcaacatcaacaataacttcagcaatatattgtcttgcccaaacatcaggaagcgtacccatattatgtaaaagagttgccagatcacctccatttaaatattccataactaaatataaataatgagtactttggaaagatgcaatcaattgcacaacatgatcagaatcacactgggccatcataattgctctctctgccttaacattggtaacttgattcttagcaatcatatctgactttttcaagacttttatagcaacataatcacctgttaattttctcttagctagaaaaacggaaccaaaggcacctttactaattggttttataatttcataatctttaatagatggtgcttggtgttttggggttgttgaaacaagtaatggtgataatggtggtttgtcaccagtggaactttgttgtaacattaaagatcctaatgacattttcgtagactcaacgggttgtaaatatggtgagttaaatggagagctaaatgtggagtctccctttttaggatttttctgtagtgatgataatggtaaagagtaagttggtgatgtaggtctctgtggtgtgagtaaactgttaccagttatatttccttttaatcttggggcatcgtcacttgcaacagtaattattggtgtagatcttctgattaggccaggtgttgaagttcttggtgttgaatttcctgaacttaaattgtaactactactcgtcattcttaaatcttcctttgaacctgtaaatgaagattccaaataagcattattgaaaactacaccttgatttgatgatttgggtgttttagggtatccaatttgaagggaagtaaaagatttatttttgttgatagaagcaatatctgtttctgactctgattctgaaaaacagaagacatgttctctaattttttgaacagcatttttaacagttagcaatactaattcattggtttccctggtaattctgtcaacatattgtaatatatgtgagtatctttcaatagtttcaagtttattatctaccaaaagttttgtatcttcagttaattgttggattgctggatcacttgaggcaggtaagttcagttcatgtaaattttttagagcaattcttgaatttggagaatacgctatttctacgaattcagctgaatctttatatgttgatctaatctcacctggattaattaaaagtgcttcatcacaataagatagaagaatttctaagtttctgaaggggaacctaatttgaggtaacaaagtacctgaactttttcttctttgaattagtgattgaggtgtgtttaaattatgtggtcctaatggtattggaaaacctttgtattcattaattgatacaaaactactgttagatgatgaggaagatgatgataaagatgtctctgaagatgagttttgtaaaccaaaactttgaggtgaatttaaaggtgataaaactgatgaagaagtagatgttgaagatgttgaagcttgtgattgtgattgtggtaattttttttgtaaagattccaatatattctgcaacagtttcctatgttcctgtaattcttcttgattaatataaaccaaatcttccactcgatgttcaactaaacataattctgaatgtttctctaaccaccaatttggaactttctcttcacaaattctacacaattccattgatggaggtggtaaatcattttcatctgttgtttctagttctgttaaatatgtaatataagattccattaaatttattccaaaagtacctagggtagatataagttcatcaggaaatttaagatcgacattttgaattggtacccaaggcttaactatccacatagaatgacttggtttattaaatttatcgtggattaaaattccctgtgcttctaattccaaaaatcctccatctgttgttattgtagatgatgttgaatgaatgcttaaagaatcattatcagaattatcatttgaagttttagatattacattagaaggtacttcattgaaatttgtttgaacataatcatcttcattagttttttcagaacttacacttgataaagttggtgagtctttttgtatactggattttgaattgttatctgtagtttttaaattagtttgaacaataaatctgattttataactttcatcatccagtgtcatgatacctgttgctttatgaaaaacatctttatctgattcattaccaacaattatatttctaattggattatttataattttagcaattttcgttccaacaattacttcccaacttctacttataaacttaatattacaatccagatcaagctcaagtactaaagctttactttgagcaataaaaggattttcactattgttatcaattggagctctctttttagttttcaggtcgttggtagaagttgtaatgatactattatctttcatggtacttaaagtggaaatatcgttgttaatagatggagacattcgcagttgtttctctattgatgtgattgattgatgatcatctgtatttaggggtgatattgatcttgatgatacatttgaagtttcattaaattttacagggaatggatatttattattaagagactctatactatcaaagctatttaatgatgataaatttttatttttgccttttctatcaagattaaacaataaagcattgtgaagaattttagtatttgatgaattcaattcatgggtattattaatatctttagatttagtagatttattctttttatcagaacttttcaatgtattgtgtataaaatttttagttagtgagccagcactattaaactagattagttgttaatggacgattccttgtaggttttggagctggtagatgagcattgtttgtagatttgtgatcatcatttgtaaaattgcttatatttttatttaaatcttgtcttgaagtatttgttggtgaaggtgaagaatctctatcagcagaactaaacaattgatgacgaattgtttcattcaatttatggtttgaatcctgtttactcattttctagtagatttcaaatcctatatattaatcgtataaaactgaatgaacactttaaaatagagtaaaaaaactcttaaaataatacttttgtaagtatttaaaattcttatagctctatctaccagaaaagaagatgagctttgatataaaggtaatgaaagtagtttaaacctagtattataatacaattattatgcttaaatcagttattagttgtatacccaaaaggggataccattgagtgatgccctctgaaattccacattcaaattagcatttataaaatatgcggtcggtacgtcgatatcaaaaccatatattacgtaacatgataataaacccgggcttatcgtgtcaagaaagagataatattaaaattattattttccttatctctccaatgtcaaattggcctgccacatttttatttgccctcaagacatttttaattgctcatcctatctcttttgttttatctatttacttctctttcttctttcctttcctcttacctttctcttattcctttcttttatcacctgctgtatttcacctgtgtattacatcaaacaaaacatctttaatataagttctctctctctcattattttaactttatattttaaaaacttttaaaaaaatctctcttcttatcattaaagatgaaattatcttcctcaatctgtttctcaatcgtttcagctttagctgtctctcatgtttccgctttagttttaccaaatttcaaagattctaattcaattgttgaaaaacaacaatcaattgaaaatgttccaacttctgaaactactacttcatctgttgacttctcagcaattcaattagttgatgaatctgatgctttagaaattcaattcaatgaaaatttaatcccaaactcttatattattcttttaaaggatgatgtttctgatgatgcttttgaattccatagattatgggtttctgatgttcaagttcaatcatttgcaaaattggatgcaattcaactcgatgaatttgaaacttcagttaaaagtcttgatttccaatctaaaatgggtggtatcaatcatgtttttgactctccaggttttagaggttattcaggtttattcactcctgaagttattagtttgttaagacgttcaaaagatgttgcagttattgaacttgactcaactgttcatgcaattgaatcaacaactcaaaaaagtgctccttggggtttatcaagaatctctcatagagatactttaggtttaggtacttataacaaatatttatatgatgatgatgccggtgaaggtgttactgcttacgttattgatactggtgttaacattgagcatgaagaatttgaaggtagagctgtttggggtgcaactattccatctggtgatgctgatgttgatggtaatggtcatggtactcattgtgctggtactattggatcaaaaaaatatggtgtctctaaaaaggcaaaaattgttgcagttaaagttttaagatcaaatggttctggtactatgtcagatgttgttaaaggtgttgaatttgctgcaaaggcacatgttaaagaagcaaaagaatcagaatccggttttaaaggttcaaccgctaatatgtcattaggtggtggtaaatctcctgcattagatttagctgtcaatgcggctgttaaggctggtttacattttgccgttgctgctggtaatgataatgctgatgcatgtaattattctcctgctgctgcagaaagtgctattactgttggtgcttcaactgtctctgatgctagagcttacttctctaattatggtaaatgtgttgatatttttgctcctggtttaaatatcttatcaacttatattggttctgattctgcaactgccgttttgtctggtacttcaatggcatctcctcacgtttgtggtttattaacttatttcttatcattagcaccatcttctgattctaaattctcaagtgcaagtattactccaaaacaattaaaggataatattattaaatatggtactaaagatactttaacttctattccagaagatactccaaatgttttaatttataatggtgctggtggtaatattagtgatttctggaattacgaagaatcatcaagtgctgaagatttaattgataattcaattgaaaaattaaacaaatacactgaatcaaacatcaatggtgccaaaaatgaaattaaacatttaattgatgaaattgttgatgcagttgagcatgttgtttcagctgaattaatttaaatagaattaatttgcatttgtttttttaataagtgtttggtttattggtatttggcgtttcttattgggttaatttttttatttttatctattattgttctttcttttatttttactttcatttttcattttcactaaacaaattatatttttatggcattctattattattttgcacaatctataacattttataaggagaaaaatcatctaaggtttattgttaaaaaggaaattagtttcgcagtaaaaggaaataagccaaaaacggttagttaaacagaaaatatacaaaatacaaagtggatatataaagttgaataagaaaacttatattaatttgaaaaatttcagtatgttgtagcaagctgagtaaatagaataagcacttgaaacaaacttaaagatcaaccgcccaataataaacaataaaagtgaattaatcagacaaactactaaagcccttacactccattttcttcttgactgttgaggaataaatttacctagtaagtaaatgaagaatgatataaacccaactgctggtatattataaagaaatctttgggttgaattattaaattctcttgcagtttgatttgatggtacatattcttctaaccaaagataaaattcttgtaataatgaaggtgaagtatcataaagatttgaaaaaaaatctggttcttgagtgtaaataatttctttataagttgatttacttcttcttgattttttcttagttgtttttggttgaattgaattttccatgtatgaattattatattttaattgattctgttgtgattgataattattttgatcactgttcaatgatggattatgtaaaccgttaactttataatattcatattcttttaaattttgtacaaacttctcacgttcatttttaagtatttgataatctctttgatttctgtatctttcagctttcagtttagctttctcatattcaatttcgattcttgatttatgatcatgaagcatcttgagcgatgttgttacttgttctgaaacaaccaatgatttagtatgctttgattttttctttgatgacgatgatgatgatgataatgatttcagaggatttcttgactttttttcctttgaaattatttctgtttcatttccttgacgaatagaataaggttcaataaattcatcagagtctgatgttgaatcatcaattattgcagttgaattagttgaatttaaattaaataaatctggtatattaccattcctgctggaattattacttttattattgtatctaacagattcaactaattcaggctcagctctaagaccaccttcttcattttctgataataccaaaaaattaccattagattttttaccattaccatttttcagtttcctaataacattctttggtttaaaaatattcagaccacttctacttggtggtgattgttcgaaaactccatgttcagcatcaattacatgtaatgatccccttctcctttccggagtttgaaaaacgtaatattgttcattagaagttgattcacctgtactacttctactgatacttgatcttctgctacttgttaatatcgacatcgtgtagtttgatgattaagaagaatatatacagtctaaaatcgataataaaataatctactctataatcaaattcaataagacttccccttacagaatattaaaattaaatttattacctgtcacaataaaaagatttactatgataatcgccagactttcctgtttgggacatccgttttctgacccagccaccctaaagaggaagcttgatctatactctattaatataatctatttactccagaaggtacggtgatcagcaagtattgcttcctctaattcagtatcactctctgttgtagcaaatggtccaacaacttgaacatccttttgaccatgaattgaaaatttctctacatggcatactaagtgtcatattctctgtattatcacccgttaattcaagtaatttttcttcacttaatccataaacaactctaccaatatttgaccaataaattgaaccagcacacattgagcaaggttcaaaatttgtatataatgtacatttccataaaaaatcttgtggatatttatcaaatgcaactctacaaagagttgactctgcatgattgaatgtattaatattaccttgttcaattaaaactgtttcattatctggtccaactaatattgatccaaatggatgatgaccttctttcataactttatgagcaacattgacagacttgaataagttatctctaatctgttttttattaggatttacacgttcagggaatatgtttacactcattgttcaactggattgaaagtgttatataaccgttggaaaaagaatttatccttacaagtcgcaaaattattacattcttcattttttgattggttttatattttagtattatagaattttgttataaaataaagtaaaataaaataaataaaataaccaattcaactcaattcggctcataacataaataaagttaaaaataagataatgtcgttaaaataaaataaagaaattagattcacatcagatcagtctgatataaacatagattgtccagcaatttcaagcatttcatttcttacctgaaagactgtcactaatcttttggaaaacacctttatcttcttcaggttgtaaattagatgctgctttatcataagtgttagatgcaccttcagatgccttatcccaagtggatttttgtgaatctggagtcattgtttctgaaattttgtcagagaagttctttctaccttgatcagccattttgtttatttaattaatttgtttttcggattgttcctgataaaagaatcctaaagtcagtatttccagtattaaggaataggggaacaactagtatttataccaaactcgatgggccatgtttgtatacactacatcacctttcacctccatgggcagtggttatggggtctttttttttgatctcctgtagtttattattacaggggatggttatatattagatcagcaaagctggactcatgagctactgaccaggtaaataattactataaaggagatataacaatgttatgggaaaggaatccatctagacatgtttttttgatctagactttttctgttacatgatgacgttttattgacattttcttaatcattgcacaaattgtatttattaattaattaaacaaagagaagtgacataaactatttacagattttctggtattatagcacagaaaaatattgtatacccttaaaataattaaactgattaatactgaatacatgtatgtgattaaattgagtgatgatcttatttactaattagtcttttcttgtaattcaatttgaccattaccgcaacaaccacctgtggtattaccagcctttaaagtagatttgtttactttaatgtcttcattatcacctaattcagtgtctttatgaatattcaaaacatatcgactatcatcagtatcctttttaacagcttgaacaatattatgtttcaaaaattctgaaactttttcaagtaattcaattctttcttcaatattgagtttcggattagaaattgatttttcagatttaatttcttgtcttattttatttctagcttcatttaatgttgtaaaatcattattaaatgcaatttttgttgcacgtaatgatgaacgatatgcattcaatattctttgtgttgaagacattttctgtatgttatttatctagtgaagtgatgtattattatacccaaaaaaaaatattcaaaatctctaagtcaataattttcactcatttaattgatgtcttagtaatgaaaaattaaatttaatctcatttgttataggaaataagcaaagaaaaaattaaaaagaattgtccctccggccgggatcgaaccagcgacctcaagatgtcttgtatgctgtttaagcctattacagtctcgcgctcttccaactgagctacagagggttgttatgtttgttgaaaggtgttctcgttctcgtgattgaggtgtattatatttgtatggcatttgcaaacttcagagtagcaagggtttttgacgaaaaaatgattttattaaaattcccataaattgtggaaaatagaagtctcagcaatcacaagaacagtttttcaaccctacttggctaaagtgcctagtaatagatagcaaaaaaaatcaagtctttaaaaatgttttttagattacacataagctataaatacaattttaatctatttatttgaagcattaagaagtttatttaaagttccaacactataccaagaatttgaaatatttgcaatccccatttcacccttgacataattactatctttaaaaccccaacctttcttatttgcaaattcaattaaaatatcattaacaataacagcaagtttaacaaaattttcttctttaaatctttctaatctataatttaacatccaacaaacatctctagttaaaccatttttttcatattctgatttaatttcaggaaatttatttataattggtaacatactttgtctaaatatatcaatattaaccattgttaaataaaatgcttcaaattcaatttggttaggtttaaattcacgtaaattagttttcttaaaattacttttacgatgttctaaataaacttcaataattttctctgaacattcaaaacaatttgggaaattttcttgctttttattacccataaaattatataataatgttgaaagcatataacttaaacggaaaatttctgtttcttcaggagattcccaacaaatttctaataattgcggtaaacctttctttagatgtggagtaaactctgtaccgtctaaactcattgtatgtataattgagtgaaagcaaatatacttgttcattcatcattgatcaaaaatcgttgaaaatttcactttcttttaatttaattttatttccctaaagggttaaattgaataattttaacgcgaagtagtgatgtaatgattataacttattattattattagaggtttcatgacaatattattggggatattaataaataaataagtataaaagtaggtaactaactaaataactatagagtataataactatatatttagttaaatttgataatttgtttaccagattttgaattcttcaaagcattaatataagcttcaagtaattgatcatcagtaagagaatcaagattaagttcagtttcattatatttttgttcagttaaaacacctgattcaattaatttagtaacttcattaattgtatcaattcttgaatttggaattgatttaatattaccagtaatccaaaaacctttaatatttaaatttttaaaaatcaataaacctgttggaactgtaacaggtttcattgacataccaccataagttaataaagtaccactattacctaattttctaattaaaccagttgcacttggaccaccaacacaatttaaacctaatttaatttctttaccatttaaccaagatttaatttctttactaaattcttttgattcattttcttcatcagtaataactttagttgcaccaattgaatataaatctttctttaattcatcaatattatcacgatttctaacaacattaattgaattaatacctcttgattttgcaatttgaattgcagctctaccaacttgagaatttgcaccattttgaacaaaccaatcaccaggatttaatttttcataataagttaacatttgataagcagatgaaggattaactgcaattgttgcagcttgattaattgataaattttcattaattttaattaattcattttcatttgataatttagtgagtacaccaagtaccataattaacatttaaaggtatacaccaatcattaattttcaaatttttaacatttgaaccaattgcaataactttaaataaaccttcattacctgaaactgatgaaggttttaataaatttggtaatgaatcaattgaaattgaaggtcttgaagggtaaataccttgaatttgattaatatcagaaggattaattggagttgctaatgattgaactacaacttgattttcatttaattcatttaaattaatattatatgaatgacatttaatttcatcaattggttcaccataggatgaataaatgattgctctagcagtaattgaggaattagttgacatcatacgaattgaagcaggtgattgtttaattgcccttgtaaagattgatgtgaacattacagtaataaagtatataacaatttgccactgattctacagaaagaacaagtgattaaattaaatagagattatttcaactgtggggtaattattaaagctatttattatacttatattcaattagtaatcacctctatataaaggctatatctatattaaggagagggtttctctttagttattactgtatagactatatacctgtcaatatactactgtaaactactctattactcttgtacatacactatatattgcagtaaatgcataacccatggtttgcataatgtaaaacaaaagaaaagaaattttttccatctcttaaattgacatggttatatattactatcttataatgttcttatcttttgtaggtgtagatatagatatagatagctacttagcatccattatagtaactgtgaaatggtattgaaaccatcacataatattaacaataaaccattacattggtcaaaatctcatgctgcatcttcattaagtgtatcagtttcaactccgacatcttcatttaatgaatgtgaaactcaaatttctggtttcccaccaattcaaattgaatcatcagaatcttcatcagaatcttctgaatcttggcctgaatatcctactcaacctgtattgaaagatcattcaaaattgtcatttttagataagtatattttaaataataaaattattcatcatcccaatgataacaataataatcatcataataatattgaagttattaaagaaccacctttatcatcatcatcttcatctagtgtaccatctggtggtgcaagtattttcaaaaaaatgatatcacgtaaaactttaataccgaaaacaaaagcttttaaaagaattactgcagatatgcaatttgaacaatgtccattagatgaagaaattcatcatgaattattaacaacaattgcaattagagaggatgatcttatattaaattataatcctcataatattcataatacacaaaatttaaataatattcaacatatgcaaagtattcaaaataaacacaattttgaattaattcataaagctaatgaatcatggaataaaaatcgtagaaaatcaaataattctattaattctcaatcaacaactaatggattaaatgatactattatattcaataaaaaacctcaattacaattatcgaaaacaaaatcttcaattagtataccttcattaaataggaaaaggaaaaggttagtagatgatttacaaacttataatgataatattaataataataacttaactgatcaaggatctgaacatggttcatgtgttgaaactgatcctgaaactgatactgaaacaagtcatttatcttggatgataagtaataaacgacgacttgtaagtgcaagtgttacaaattcacccaaatcacctgcaatggaaccattcccgagcagaagaaattcagtattattcctaagtctacaaagtgcatctgatgaactggagaacatgtctcttaaataagaacagtatgcattatagaggatcaaaattatatattttaacttttccaccctccctctttttatgtaaaccttattgtggcggctctttcttttctaatcaataaaatccattcctttcaaaaggtataatatattataccaaatacattcattcaactaacagtatatatacagtataaacattcatttaaatacccataactaaaaaataatatatgctgaaaagttttaaaattgtaatattatgaaaaactcaatttcaaatgaaactttaaaaaatgtttcaataaattcaaattctaacgaaaattctaatgaaaactcaatggttaatgaaaattcaaattcttcaagtactaatacaactaaaataatctcttcaaatgaagaaaatgatacattaatacttaataaatcaaaattaaataaaatacgtatagaaccaactagatttccttcattaacttttatttcacaaaatacttcattaaatgatagagagacaagtattaaaaatgcaaatttgaaaagtgaattaattgaaaataataaacaaaccaaaaattcaaaggaatcattatttaatactcaacaaattataaattatgataaagatcattcatcacaaattaatttaaatgattcaattgaaagtccttcaatatcagtaaataattcaaatttttataattattcaaatatcaataataatcaatctcatgttatatcgaagacaagtagtataaatactttgcaaacggtatatactgatgcttgtagctacatagaaaatgatgataataaatcaactactcaacgttttaatgataatatatcaaatttatatccaactgattttgatgaagcaaattcaatttatcaacaatcattacattcaactaatcatgatatactacaaaagaataataatttaacaaataatcttaatcttaatcttaataatatcaacaacaatactaatagtaatatgaaaaatggtactataaaggaagaaactgaatcatttatttacaacgatataaattctgttgatattctgaattttaatgatcataaactacaaaagaaaggttcaaatgttatggtattccaaaacccatttggaaaagatctcaatgcaacaaacaccaataataatatcaatcatcatcgtagtaatagtacctgtattacaattaatacaaatactaatgacaataatcccaatactaataatgaatttgattttctggataatcaatcgttatcaactattcaaacatcaaatgattattatttgataaataactcaagtaaatctccaacttctaaaagatttatatcacaacaacaaaatataccattatctccaacatattcaaaagtacgacaagtttcacagaaaatcttcccaaattttaatgcattttcagttaataattattctaagattaatcttgataaaagaaataattttagattaatcccaaatgattttaatgaacaacaaaataatttgttaccaagtgattttgataataataatgataatgaaattttagaagaaattcatgaagaagaaaatattacatttcctaatataaattcaatcaataataaaagcaagctattaagaaaatacaataattctaatttaaaaacttataataatcaaaagagaaataatgaaataaattacaaaaaaaataattcacaatctaatcaacaatttattgattatgggagtacacatgataattattcaagatattatgattcggttgatgattatattgaacgtgaagatagtatatacaataagagaaattcaccacatgattataaatcaatgtattatagacaaagtatgatattgaatttcttaattagtggaatttatattttcattgcattattattactattttcatttatcaaaattttcataatgaagacttttgataattcattaaataattttgaatttttaaatttagaaaatgttttaataagtgatgaaattttattaattgacataaattcaagagcagttaatattaattttcaagatattaatatttggaatgtggattttaatattttccttataactgatgaatcaaatttaatggaaataagtgatgataataaaatttattattcaaattctaagaatgatattacaattttgttaggtaatattaatagatttttaacaccattaagatttaatggtattgttgattcatcaaattggaaagaaatttgggaaaagtggtgggattccaaaaatatcaatccacaaatttcaaaagctcaattgaaaatgtataatcctggtaaagatttttcatttaatgattcaaaattaactcatgaacaatggttaaaaattttaaattcagattataaaatcattttaagaggtaatttagaatattcgttaccacttgtttggcaaaagcaatttattagtatatcagctgaaattgatattaaacctgaaacaaataattgatcaactggatttgctttgtctataagttattaatttttgtaaatcacctctaattttcctattttcaatattttctacacctctattaattctaagtaataattttttatcaattgcaggacatttaacatcattaaattcatcaattttagataaccaacaaatatcacatcttctaccaattggtgtacaaacagtttgaccaaatcccacaagtacaggattaatttccatccataaatctttatgattaatcaacattatttctaataatttcctaacattatcaggatttttctcattttttggtaaccaattaaacatattacacaatctaaccatatgagtatcaacactaattccaacagtttcattccaagcacgttgtaagattaaatgacccattttataaccaattccctttaaattaattaaatcatttatattatttggtatatcatcgttaaaattttcatgtaaaattttagaagtttcaattaaataatttgctttccttgaatggaaaccaattttgaaaatcatttggtctaattcattataagaagtatttaaaattgattcaatacttaacccatttttataacctttaattaaataatttaaatgtaaattttgcattacttgataattaatttcatcctttgtctgtgaagagaataataatgttacaagtaattgaaatctccaaaatttatcaatattcgatttattattttcaattaattttaattcttcaaaatagttgggtatttgatcaattgatatttcatcacttataccattttgaaatcttttcgtaattaagaataataatgcaggtattttaacacaaccaatcaaatcaactggagttgtaattaattttctcatttctttgattttattatacataggaaagaaattatcaggtattatagagtcattatcgccatcatcagtagtttccaatttgatatgttgaagtttccttactcttttagttcttgattgtgtttttgattgatccaaaacttctgtgttttcagattttacttttgttatagatgttgtgcttaaattatttgataattttattttatttttaaaatatttactttgtgacattaatattagaaaaatgggaatattatttaatttagtatatgaacttatagatttactatacgttgttaggaagagatagaaagataatatacaataaagaagagatatatatgaaatttgtagaaaaaaagaaaaccgatgtgccgagataacttaatgagtgcataatgttgagtctagtataatatgggattggtattggtattggtattattagttagatgtttaattatttgatgaattcaaattgtgataaaattggtaaatgatcacttgggaattctgaatttgggaaacctttgaaatcttttaaataattttcatcaatatcagctaaaacttttgtaaatttaaaatttttattatcatcagcaaaccaaatataatctataacatctttatattttggtgtataagttgtctttgtaaagattttttcattatataaatctttataaggtgatttaaatgtacctaaattatttttcaatataccatttatatttgaaccataatcttgattaaaacttggttctaaatttttatttatagatccatttgataaaaatttataaaccattgaatttggatttgaattaaaatctccagtcattataatatttggaccatttttatttttaattctttcatttaattcagtttccgttatattataatatcttaaaactgtatttttaattaaatttgttaataaataagattgcattaatttaacatcatcatgttttggagaccaataaagatgagtatttgaaatgaaaataacttcattagttaatttatgttttaaaactgcaattaaagcaacagtatttctaatatttaatcttgtttcagtatctaaagtttgttcaattattgaagaatgtttaaaattatttgcaaaattaacttgttcaaaattaattaaatcaaatttttctttattataggctattgaaacaccatccatcatatttgaagattttttccaataagcaggttttggctttttattgaaaattgatgaataaccaatttcattaaataaatttttccaatgattttgataaacttgatattccatttcttggaaacacattatatcagatattttagataaatcaataaaatttttatctaacctatttaaacgattattccaatttgtaaaattttgaggtaaataattatataaactttcccataaataatgacgagataagatattatatgaagatactgtaacagtttttaaaggatttttaacataatcaagagaaattaattgacgatgatttaaaattgaattattattagcattattatgatcattataattataactattattattattattattaatattattattatcaatttgaacaattttagcaactttagatacatttgaaagttttggaatattaattaaagaattggaaacattattattaatattaggtaaagtaagagaacgtacgaaattatttgaaagattagtataactatgggtcataccggagatattaattggaactggcatgtctcgtatagaatgaagatatagggaagaatagggtgataataaatgtaaattaaagaaaagaaagagtagtgataaaatgaacatcccaaacacctctactataatacacagacatacctaatacatacaattgaaactacattgataaaatacaaaacagcaatatccttatatcatataaaccttaactccttaatattattattattattataagatcttcaataatgcctttcaaagagggggtgtattttatttcttttttttccttttttttattttttttattgtgttaaatgcggggtgtactttcatatcattacgtaatggttttcttacatctatttctatttctatttctatttctatctttggttaaaatactttaaactgaaattcaaattacataatatactatactatactatactacttatacactggtaatatcttcctctctatgtcttacgtgatccacttccactaatactattaatattactattattattaaaattattattattattattattacctccgttattaccgctacttccgaaatctgcctttatacgtttaccattacctccctgttgacgacgaaattctaatctcgtaactaatgaaatatgatcagatggccaatcaatagttgggaatcctaataccttattggtataatctttatctggttcacctaaaactcccttaactgaaagtgaagaatttgaataccaaatataatcaataacttctgtaaatgttggtgtaaaattagtaaatggtaattctccaataatatcatatgcactacgtaaatgaaatggatgacttaaaccttcactggtaaatttaccataatctctatcctttaaatctccatgatctttagaaaatccttgtgaaattaattgataaacggctgaattagtttgtgaattgaaatccccacaaattaataatggtactttgttattttcattattattgttattgttattgttattactattaccactatttccaatactatatttcttggtaattgattgtaattcatctaataaaactgcaacttgcattgccttaacatcattatattcaggatcccaatgtaaatgcgtatttgcaataataacttttctaccacttggaatatgttgtaatatactaactaatgcaatattatccttattcataaatctattaaaaacatcatcagttttcttaaatttttcttgacttataacaattttaccatattctaaaattttcttatcaactaattcaaacattttactttgataaaatgttgcacatccatcaactcttttagctcccttttcattcattgtctttgcacgactcttacaatggaaaatacctttataacctttacttaacattaatggtacccaataatcttcatatgttctactttcaacttcttgtaaacaaattatattggtagaatatgataaaatttcttcagttagtttctcacgtctatattcccaatttaatgcccataatggtgtatatttatacatcttaggtgttgcataatgttgacataatgtattataactcattaatgtaaatgaattattatccttactctgtaaatcaatctcattaatattctttaaatcttcatctttcatcattggttctccatcatctccaatactaatccatcttcttggttttggtttatctaatttaatacaatcatctctaaaatgaataattaaacctttggtaccctttttagatacaatattaacaatttctttatttaaattaatattaccttcaataccaataaattctaatgaaactaaattaccaaaatttgatggtaaatctttaatatcattatcaaacaaatataaatatctcaaattaaataacatacctaattcatcaggtaatgtaattaatttattatttgatatatctaaaactcttaaacttttcaatgtaccaatagatttaggtatttcagttaaattatttccatttaaatataatcttctcaaaaatgaatatctaaataatttattactaatcttattcatcatttgtccacttaaatctaatcctgtccataattgagtattattttctttaatacgaattctttgatcttcctcttcttcatcaactgcatctgcttcaagtgctcctgttttccttgcaataactgcattagataatgttggtgtacttacattaccattatttttggcactttctgcttgcattaatgcttgtgtattggcaatttcttgttgtttaataacatttgttaaaatgtttttagtaacttcaattaatgtaagtccttgatcatcaatcccaccaatttgtgattgtaaaatagattgagattgtgattgttcagaaaattcagattgatcagattgttgtgatggatcagatggttgggattgtaattgtgatgcaaattgtgactgagactgtgatgttggtaatgattgagattgagattgagattgtgaaagtgattgtgaagttggaggtggttgaatattagtattttgaggtaaaagatttgtccttgatgaacttgcagcatgtcttgcatagaaatgcgaaatattagatcttcttgaaacaaatgccaattgtgtttgatgtttccaatgaatagaatttgcaattgtttgatcaactgaaattgatttgtattcaacattaacattattgatattgttagtcatgttattaccattaagtatcatattattgttattatcatataatgattgattcatctcagtaacaagttgagaaggttgtaattgtggagtcatttgattcattgaatattgattttgaaacttttgagctaataaatgttgagtcagttggtgagtcaatggttgatttgaattattattactattattgttatcagattcattgtttatagatattccggaagattgtgataaaagtgaacttacatcttgtttttgtttctgtaactgttgaagttgttgtaattgtaattgttggagctgttgttgcagatgatgcaattgttgagtagactgttgcggttgctgctgctgctgctgctgttgttgttgttgttgctgtaattgtaattgttgttgaagttgcgacaagttattgtttccaggtaagcctctgatattattagataaaagatttgatggattcataccttcatttggtgattgagattcagccaattgctctaaaacattatcagatggattgaattgacgttgttgttgttgttgctgttgttgttgttggaataaatattgagaattattatattgagcacccgtagattgaccaggaggggacaatccattgggtgttgacccatgtagttgatattgtgttgcaagattcattgattacttccataaatgataagattttcaatactaaaaattgcaacaaagttttttttcagtgtttttgtgcttagttagttattaaagatgaccttaaataaataaagaaagtttaatcaaaagaatacctattaaaactgtagtataaacctctaagagagcgtgataatgtagtaaatcaaccaatcacagagaccaagtttgccgtcgagtgtaatcaataaattcacctatgaatttccagatgtaacttattacatgtttttctcgacacttgagattaggaagacgacagtctcagagggagaggcaaagtgtaaaactgcaaatttttaccatgagaaagtcgcgtctgccaaagcaacactagtacaccgtttattacataatcattctatacactatacactatatacacactaccagagtgtcttagacatgaacttcaatgtctgtctggcacgttcaccaaatctacgggatagttgggtatcaataatataatcatcaagtgatgaagtgttttttgtatcgtaatcagcggatgttgaattagaagtggacacttcttctttaatttcattaatttcattattttcattatcattcaaattaacataacagtaactaaacttaccatctttaacaatcagatcttttaagtattttaagttagcatcattctcctcacttccatctactctattcataatatcttcaaaatctttacgttcaatccagttgacaatcagttcattgaatttaccttcttcaattttatattgatcattcaatgatctgctatctaagttataattcttatatgatccaatcaatggccaaaataaattccatatatttgctttctctgattttttcaccttcatttttttcaataatggatatttctcattgaagttttggatatttaaaacaattgagatttgtaaatcaagtaaatattcaccatcattcattttaaatacatacaatggtaggtaattttctatttcattcttttcaatatctttatcaaatttaagattttgtaatccatatggataataactacgtataagctttcttttctcaatttcttgatgcatgttctctttgagtttactcatctcttgttctttcaacaacatattttgttcttcttcctcctttctccttttctctaacatctttctttcaattttaagtttttcttcttgtcttgctttttctaatgcatcaatcttttgggcaatttcttgttgcttaagtcttttacgttcatttctttgatattcaagggcttctctagccttttgagcttcaatctctttcaacctcttcgcttcaatttcttcaggtgtaggatcaacaggagtattggccttctctatactttccacacttgctgactttcttggtttgattgactccatttttggtatagtcttcggtgatggagatcttatatccattagtttttcttcagtaagttttttctttttatgaacaatttcttcttctccattatctaaagcagaattatctctcttcttaattgcaatatcataatttgttatattctttgatacagaaatatcaacagcaacttcgtctcctttgtcatcctcttcatgctttatttcgacatcaacagcttcactaaaatcaacattatctgttgcatcattaattctagttgaggtattaacaaaatctaaatctgattctgcatctggttcagaacttgaatccccttctgattcaggctcaatcaactcagagtcttccttatcatcactatcattctttacttctttcttattctttttatcaagtttaataactgaagcaccaattttggaacttaaaagtttgtattcttcagtatcagtatcaccaatttcagttaatatatcaagtacatttctaccctttttatcaactattgaaagatcagcttgattggataataataatttaaccatctccaaatgatctttaccaacagcatgcattaatggagtccatccattcttatctttataattaatatctgcaccaaatgcaatcaataaacttgcaatatctgggaatcctaatcttgaggctaaaagtaatgattcagctggtattttattaccatttgtacttgaaacataatttaaaacaaatgtaacatcattacgtctaattctttcttgcaaagaatttgaatcattgcctttgtatttaccgagactgttgataacttcctcactaccagattcactatcattaattctttttctatctttagctttagttgtaacggaatttctctttttgaaggttttaacatatttatttaataatttccctattttcttagaatctttcaaattttcatcatcttcatcatctaattcattgatcgcaagttctaaagcatctaatgcactattaccttctgcattcaataaagtcggatctgctccattttcaagtaaaagcttcacaacatcataatgaagattagaaactgcatcaattaatggtgtatccttatccatctgtccactttgaacattaatattagcaccattatcaatcaacaattttgcaatttcataatatccttctaatgccgcttcatgtaatggacttatacctgcaaaatcaacacaatttatatcacttttggattcaattaatcttttaacttcatcaagattacccttagcacacattctttgtaataatgtacgaccagatgcatctctaccactacgggaagattttctttgttttggagattgagaacgtgagttatctttacccttacgagtttttgcaagtttatgaggggtactttcactgcgatttttaacatcaacaactgcctcttcatcagagtttgtagcttcttgaagcatcaaatgaagtcttttagctttacgtgatgggacaggtattgaatcttcaatatctgtttcactttcttcatctttatcaactgtttcagttctttttcttacgattataggatcatcttcatcatctatatcatcttcaatatcaccttcatctttagaagtttccatcttttcaggtttattactttctatgatttgagttttttctagtttatcattactctcttcttcatggtttgtttcgaacttaaaatcagatttaacattatcattgatatcattagaaatttcatctacatctattccaaaatcatcatgtttttctactattacttctgtatcttttgattcttgatcagtttcttttaattcaagttgttgagaagacttatctttagtttcagatttagcttcaatttctttcttatgtccaacttcatttttaagagtttcactatcttcatttttatgttgacttacagacttccttcttttcataggttgcaaactattcaaatccaatggttttttttcgacttcatgtataaaatcttccttcttctccttagcaataagggttttactttttgaaaaaaaactgttagaatttgcactagttggatttgaattattatctcgtctactactgaaaagttttgcactgttaaacgcttgttcaggtttggtggtgggttgttcagaactcgtcgttgaatttattgctgtattattaggtttattaaaattggtatttactgttgggttatttgtgtactctttatgatataatacattagatgatgaatattgtggatattgagattgatattgcatattattattattcacttcattttctccaatagaattagcattatgatggggagtatatgaattatgacgtccattgtattgattactataaccgttatgattgttataatggccacctcgggagtatccatgccctcctctgtgatgagaattaccatacccatgatgtcccatatactgattattgtgaggtttcccgtggttattatgatgatattgtgagttattcattctataatagttgttgtttgtagagccttgttgatttccttgggaacctggcggcccttgacgacgatatggatttcctgacatttttctaatttttgttatgtcaataattcaacctaatatacaaactttgtttttttctttatgtgaaaagaagttaatagatacgttttttgtttgaaaaaagtagcaaaagccagatgccattaccagacttattgattaatttcgtaaatcctgtgaatgtttttcctaataagaataaagatgaaggttctcaaagtttagaatttcaaacgtcgcgactattccggcgtgcggccgagaaagtttcataaagtttcagtttgctctctttatgggtactgcgggtgaaagatttttttgttaaatcaatatattttcatggtttttacttaagggaggctgttatgcattatatggtacatggtcaaagacaccagtgataattgaggaatttcaatgaagatgagtcctgtaagtatagaggataccccatcactgactgaagcagaggaaattagaactcatactgttcaagctaaacgtaagattatccgaaatagaagaattaattcatgtaaacggtgttatggatataaacgtaaatgtgataaaaataggtcaggatgtgaaagatgtcgaaaggccaaagttccatgtgaatattatactatggatggaataaagggtaaaaatactagcacaacattagaagatcatggtaactcctcagaggataaaacaagttcagatgaaaatcacacaaaggcattattgtcttcagctctaaatacagagattaatccacaattgagaagtacagaaaatcagaatttcactctaattattagtgcaactggcgaatattccaaatttttcccaacttgtgttttcccatactatgaacatcaagctaacttaacgttattaaccagttataacgatgcaactgagaaatcaacggccgttttcaatttttcacaaatcattcacccattcaattcaatggatgatattagatcgaaagtaccatctcacgatatatccgattttctagttgatcatttcttcaattatgtttttccttttgtaccgattgttgataagtctgaatttctttacgaatataaaaaatattggaaacatccactgaaattcaaagataaaaattttttttttgttttattttcaatttatttcactagttcaactaatttgtttttgttaaaagagttagaatctatgagacactttcaacgatcgagtcatgataatttgttttttgatttggattttggtgttttaagaaatacttgtttccaatgtattgagaatcttaaacattttctcaactcagattcatcaccatctatatcgcttatcattggacttactctcatatattatgttggatcatcaaacggatttgctacaccgatacaagttgcaaacttggtaaaatattcacaaatttttggtttacatcgaagtattatcaatggatccgactctttgccaatgagggatattatttacagttttgtatggtatctagatggactttcggcatattattcgggttttcctccgaatatgtttagtgagttttttcaatgtgagcattcatctctacttcaatctgatgatatcaatattatatttttatatggtagattacaaaatatgaaagtttggaataaaattctttcggaatttaataaaatcaataaaaccgataaagattgtattgaagatattgaggaaatgtatttgaactcaatagcaattgttaatttgattaatcagaagattttgaattgtgattatcgaaatctaaactatagaaaatggttagttacggagacaagattgggcctaagaaaatcttcgttgatgtttagtgccttaagatgttcattatcatacaaacattttaacaatagcaatgttgataacattacgtcagaacttgttttacaatcaatgctattagttaatgaatccattcttaaattgaaacttggggaggaagttatgaaagaggccttttggttttacagatatgcaattccattccaagcaatgtacattgttctttcacacattcagaaatttccagatatatccctcaatttttccatgctatatgatgaattggaatacacaactagtgaattgttggatatcgattataccaatggtgatttgagaatgaaattaattgataaatctattgaaacattaagatatttagttaaattttggcatccagcacatgcagatcgttttgaaagaatcattaaatttagagagtttataagggagaaggatgaaactttgcacactgaagaaagacagagaagtcaagcaccatcaattataaatatgcaaaattacttaaacaaattcaatagtgtacttcaaacagctgcatcaacatctgaatatacgccttctacatctgatgaaacgtcacctcgtcatgttgaatctaaagtgtctgaaaaagatatgaataatgcaattaactttcttgattaccccggtctgtttgatgatacttacgaagcatacgcatttcttgatgaaggatcaaagttttggtttggtgatatataaatttgttttttttaatgaatgctttttaaatagttttatagaaagctagaataagttgttacctgctaattagtttttgaaaatattgaaaattgattgagttaacattcaaagttcacaccaaacaaaattttaatcaattttcgtgggatatctacaatacttgaatagttctaattagtatcattggaaagatagaaatctctatatccatcaaaaatacttgttatgtttaaaatgagttgcttaacatcaactattaacattatttactatgggaaaagaagattttgatgaaaaatcgaaccatttagctttaaaaatgcggcccagaaatcatttttcaaatctgcggttttaaattcagatctattttctataaattgatccggtatttccatggtgtttcctcttttgcatcaatttaagcttattaaatatgcaaaaaaaaattaaagcaaataataataaatgactaaaattgtcgttattggtgcaggtgtaattggtttgaccactgctttagaattattgaaagatccaactaatcaagtcactattgttgcgaaacaatttccaacggactttgaacattcttccgtttacacatcgccaattgcaggcgcaaactggctttcatttgctgatgatgatgatactttcactcaaaatattgataaagttggttacaaaaaatatagagaattgattaagaatgctcctgaagctggggtaactcctcgtactgatattacctatgttacaaaggaaaagtttgaggctatttataaaggtgttaaaacattaccttggtattgtaaaggtgaattttcaaaagttgttggatttagagaattagatccatcggagtataatacttctaaaattgcatatgcatatcaaattaatggtttggttgttagaacttcttactatatgacttacttaattaatgaaatgtggaaattaactggaggttttgaaactcctaattcaagattttcattacgccgtggttcagttaccaaactctctgatgcatattcattacatcatttaggtactgctgatttggtaatcaattgtacaggtttgctttcacgtgaattagaagacattgaaattgaagagaagagaagaatttatccagtccgtggaatcgtttttgttgctgaaaatactacaggaatgaaatgtaatttattaatcgatatctttgatcctaaatatcctgatgaaaagctttactttatgcctagacgtgaaggtgagttaattatgggtggtgtctttcaagaaaatgaagaatcaaaggttgttgatccaacatttatagtaagaatgatcaccaggtgtaagaagtatttgagtcaatataactgggatgatttgaaaattgttagaacacaagtcggatacagaccttttagaaaaggaggttatcgtattgaaagagttggtaaagttattcattgttatggtgttggtgcagcaggttttcaatcaagttggggttgtgctgagagggttgttggtttagtcaatcaatataaatcaaagagtaagttatagatgtgtatctgtataatatctaaataaacatcatatttattttaataaacatcatataatttttggaaaatgccaaatgaataaatagttccatttaaaatgttctatgtaatctatacataatatgtttttataaatttagataataaaaactagttaagcctctaaagcatcaacttgagttttataaacagcattagaaactttgacaccccaattccagtcaggatcttcaatgtattcaacttcaccattagttttaaaaagtctgatttttttaggatcatgagttggccattccttaatatctgattcaaaatttaagaatttaacgtaaggtactaaccaagcattaagtgattcacgttcttcttctgtataacctttatataaattgtaaaaccaaacagataaatcaccaccatgaggaactttccaatctttttctaaatgttcatctaaccattcagctctaaaactaactctataacggaagatattttcaactgggaaatcattttcaactaatttatttatcaaacctctagcagatgagtaaacttgaccatcaccaacaatattaccatatttaattctaatagcttcacttaattcttcaggaggaatatctttaaagtcttccttatttgcttcatataaatctaataaggttggaacaacacaacgtggataatagttttcaacttcaattggaatttgttcaattgtctttggagtattcaataaagaatatttaaaacattcattatcaacttcaccattaagaattcttagacctttttctttcattaaaattgcaaatttaccagtatgtaaatctttaataatttgttgagtaataaatttttcatcagtgacagctctaaaagtatgtaattttaaagttggaataaattcttcaataaaatcagtatctaaagctcttaatttttccaatttttcatgacttgataatgatttatcaatatttaatttttcaataatttcatcaaattgttcctgtgtttcttcaatagtttttggttgaatataaactaaatttgaaaaaaatgcacattgtttaatgatttgtaattcttcaggatgatataattcatatgctaattgaaagaaagttgaatatgaacctgctgaaataccaccaacggtaatttgttcgggattaccaccaaaatcagcaatgtttttataagtccattcgatagcttttctttgatcccaaaaaccaagattagaattatttgaattttcttctaataattctttacatgataaaaatccaaacatattaagtctataacctggaattattaatatgaatttattcataaattcatcatcatcaaataattcaggagcattgaaaaattctgaatttggagtattatattgtaaccaaccaccatgaatatagattaaaacaggccaaccttcctttggtttatttttatcagatactggaatataaatattattatattgaataatttcttcacttggagatttaaaatatctaaaatgtttatttggaacagaaggttgaggacattttaaaccaaattcagtataatcaccagtataatcataatcatttggtagttcaacaggtaaagtaaatcttttacttttttcaattggataagcatatggaacttttgcaaatcttgtgactgttttattacctgtacgtggagatgtgaaaacagtacctgtaagtttacctttgttaggtatttctatagtagttgttgttttataatccttggagatattttgacccattggttgttgttctttgtaaatagaaagagataatcaacctcggtttaagctgggaaattgtggtgttaagtatactgtttcaacagtcagaagataacgattcttaaaaccgcaaaacagtgaatataagtattaaaacccgctttctcaaccgctatttttcactggcagtgtcgtgtgtcggctggtgaattgatggaatcgagtagatcgatgttaaataaaaaaggtggcatctactatgctctaaggatgtatgctattagatgtaggtataattattgcatgtaaagaagttgcttcaagttattttaagtagaaataataaaagttttttattagtgtacaaattatagtgtagttctgcttcttaaaataccaaatttctactaaatgcgacttggcaaacgtattgtatgataaaatttagatttgtgtgtaaattggttgaggcgaggcagatctgggatttccaagtcgcagagtttcttagtaagcagttttcaattatgaaatgcgatttgaatgcgaattttgaattttttgttttgttggtttatttattgttagttttcttaaagatgcttaggtaatattagtaactcagaagataaaaacggttttctatgattacgtgattattggtaagattgagtttatttttagtaattaaaatggtatagtaattaagatatttagttagtatagttaaacaagtagaaaagatttaaatatgtatacaatgcagttgtgatgagagtaaagaaaaggaaggaaatagattaagagtttaagaaatccccccattcaattaattcatatattagatttaaatttggacttatttgaggtacaatttctttcaatcgattataagcatcattataatttaaattataaaatttcatataatatgcaattataagtgaagctgaacgacttacaccacattgacaatgaattaaaatttttttattagcttttaaagatttatcaattattgaagttaaatactggaaatcattaaataaatgtgaattatgagaccaaggtataaaataataatcaattgaatttggtaataattgtgaataattagttagttcctctgcaacattaattataactgaaaaatcatataattccttcaatgtaggctctgaataaaggtataaatttggatttaatacacatattggaccatttgggtaattttcacttgaagtagatgatgaaattgatgaattttgtattgttgaagatgttacagtttgaggtttaagtggagaagacggtagatgtcgagatgggtttggtatatttatatgaggtggtttaggtggcattattgatagatattgatgtagatattgatactaaaaagaaataaatatatcgatcaatcgattataatataaaaacaagttaaaaatagaaatctgaaaattcaaaaatattttccacagcaacgcgctctgtttcaagtttctacagttactttacttacttacttacttacagtgtacaatacttctggacaatgatccattaccacctactttcttaacactgtattccacttgtagattctgtaaccatgtctcaaagactgctatggaccctcctactccaaaatatacatctttggcagctataaaagtatctgtttgtccattggttaatttacttactattcctgcaactattggtaatgtatcatttgaataaataccttcagaacataaaactaatctatttttatattcaattgtactattctctattatttcaacatattcattaccccatcctcctgatataagatcaactgaaattttattattatataaatattcttcaacccatttaattaaactttcagtaattacaatttcttcatctctaataacttcatcctcttgtaatttaataaatgtttctttatttatctttttcattaacattaatatcatattaggtactgtaactaatctcaaaacatcataattataatcacttaagattatttttaaaccattattgtttaattgattatcaattaaacgttcaataattctaatacttggcattgcattaccacatcccatttcaattattgcattattattatcaatattaaatgattctaaatactctattaaatcacttgcacattcccaacttttaagtcctccttcataaatacctttaattaaatcatcttcacttaataaataatttatactattattaccattgtctgacatatcatcttcactcataatttgtcctctaacatcatatattgtccttcttctcattgaaatacctcctaaaactacattttcatatgaaattctaatatttattaaacttttcaaaatttcatcaaataaatgaattttcggtttgattatttcattatatgaattcaatggattatcaacttgaactatctcttggtcttcttgatcaaaatcaaatttaaaactcattgtttaatggaaaggaaatagaagaaattaaaaaagtgaaaaaaaaatttaaagtttcgatgttaattttccgacatgaaaatcaaattcaatatatcgaattttaagtttacagatcagcatcatctttttctaacaacaatgcaatgaattacttacaagaaactaatgcaacagatacacaaatattagatctacaaacaccaatcaagaaacttaaatttgaattaaatgatttaaattctaatatattaacaataattgaatcaaatacatcaattataaatgaaaatttccaaaatttagataaattatcaaatgagttatcaatcaacaaatcatttaattatttgaataattcatataatagaattaataatgaaattctaaatccatttaatcaatgtaatgaaattttaattgcaattaataatataaataaaacaaataaaaatttacgtaatttatcatatttaataaatattttaagtaaaattgaatcaattgataaaagtgagaagagtttatcaattaaaccatttaaaaatttacttaatttaagtaagttaataaatgaatttgaaaataatattaaattagataaaaatttactaaagataaatataattaatcaatataatgaatatattaatagaatattgaaaaattgtcaattaattataaataataatattaataatatattgaagtttaatgataataatagtgatagtgataaatcaattttaaatcttgttaattcttcaaagattttaaatgaatcaaattttgatcaattaatcaaacagattttcaattcatgtttaaattattcaataaattcaattatacgtaatttaaacaattccaaaaatttaacaaaattcatatcatcattaattaaacctgtactgatattaataacaattaatgaaatttcaaattctaattcaaaattggatgaaatttattggaaagaattatcaatttcaatcaataatggattaagagaagtaatttcaaggggtggaccagttttaaaaaacttggtaataataagggaagatataattagttctattaataaactatttgaaaaagtttatcaagatgaaaatattaggaaaactaaaaatattcagttacaaatgatgattaattcattaagtaatttccaaaaaaggtaatatacagacagacagacagacatacatacacacaattattcagttctaaatttatttgttgatgaagatttatttgataatctattattatttgatcttttgaaagaatcaccaaattttactttacttgattttttattcattaatctttcttttgataattttttacttctttccctagctaattctagatttttattccattcagcaattctttcacgacgaaatattcttgcttcacgtttctttttaccacctcttattcttttctttatttttgttgttttattaatagaaacactattccaatcatcaatttgtttattaaatttatttaaatcaattaatctataatttgttaaaattttaaatttattaacccattcataaatttcatcaccagaaactgcaacttgattaactcttaaatcatgagattgttggaaatatgatttttttgatttaattaatgaattatgattattaacaatttcatcatatttattacttggtaaatttgtaatatcattactaattatataatcatcatcattatcattatcaatttcatcttgattatttaattcaattttaatttgttcactatttgaaaacaatgggaaatattcagttttagttttattattttgggtatcatcattatttttactatctttatcactatcattattatcactcttattatcatcaccatcaacaatatctactatttcaaaatcaaaaccaggaggtggagttatttcataattattattaatattatcttcatctatttcaaaatcaaaacctagtggtggtgtttgataatccattgtttgtatagttaaagaagttgtttgtaatagtaagtatagatctaaattttgaaaaattcatgtagtgaaaaataaaaaaaattttgcactataattattttaataaggtcaaaattgaagatattgatattgataatatataataataataataataataataagttaatgaatatataaaagattgtataaatatatatataaataatataaataatatatgtagataaagaaacttatctataaggagcatcagcatttgcagcatattgatattcttgttcccatttatcaccatttgctaataatttttctttattatataataattcttctcttgtttcagttgcatattcagcatttggagtttcaacaattgcatcaacaggacaactttcttgacaataaccacaaaatatacattttgtcagatcaatatcatatttataagttcttcttgaaccatctaatctttcttctgcttcaattgtaattgcttgagcaggacaaattgcttcacataatttacaagcaatacatctttcttcacctgaaggatatcttcttaaagcatgttcacctctaaatcttggagatattgcacctttttcaaatggataataaattgtataaggagctctaaaatacatttcaagaacaatatacatacctctaaacatttcacttaaaagaaaccatttagttgccttagaaattgcaccttctttactttcttcccaagttttaggtcttggaattctaaaaccttcaggtctagttgcaaatgaagaaccagcagttgttgaagctaatcttaacagagaagtagaaggtgaagatatctttgatagagatgatatattacttcttaatatactagatctgagaaacattgttgattagttgatgaattaaagataaatttaaataccctataataccatgcatgaatcttcatgtaatacctatacttcattcccctcttaactaataataatacaatttcaaacattttctattcgctgatatttattattgcactgcgtcgatcgtctcttattggtctctttcttttctcagtgggtcggtgcgtcggtaggattttctctttctttcttaattttcttgaaatttttctcatggcatgtttatattaaactgataaagggtaaaatataaacagtatgctattttcattttaatcttaaatttctttctaattaccacctataatcacacttaatctctaacaaacaatgttaagacaatctgttcgtaatttctcttcaactattaaacctaaatttgctaaaatgaccttaattggtacaattggtactgatttacaaaaacaatcaacttcaactggtaaagaatttcttaaatatgcaattgcagttaattcaaaatcaaaaaatggtgaacaatcggtttcttggtttaatattgcttgctttttacctcatcaaatagaatttatggaaaaaaatttagcaaaaggttcaaaaatttatttagaagctgaagcaaagaatacttcttatgaaaaagaggatggttcaaaatctttttctttaatgttatttcaatcaaattttgaagttattaaatatccaaaaaaggatgatcaataaatttaatttattattcattgttcctatattttatctgactttgtatactaaatcttttaattaatatttactcatttgaatttataatatgcatgcaattatattttatgtaaaattattaattgattactattactatagaaatatttacctaaaaagtttaaaaactaaaatacaaattaaaatacaaataattcactaccaccactaccattactaccacttctagtaatataaatacttatattcatcaaaatctttttcacctccatctctaataacatccctctcagcttcctgcaattcatgccttaaattctcatcattatatgaataattatgaataatagtacttggtgtaattggactgtaaacttcttctctaatcttgtccattttatcaattgatatttcactatttaaatcattaatatatttaccaaaatctccttcttcatctctaatctcaccttcctcttcctcctctttatcaaaactattaccttcattatttcttctcttaatcttaaattcttttaaactattcatttcaaatccttcacttttatcatcataataactttcattatctccttcaatatcattattccaaaaactgaaaatatatttactttgatcattaatcaatttatctccaaataatttgaaaaatccatcctcaattaatccacattttttaataatccattcactatatggtaatttattcaaaattgaaatatacatttcctttgcatcttgtccaataccgaaaagtaagaaactaataaatgatatactaactaatgaccatctatttgtatatgtttgtcccttatgatctaaaaagaaaattgtattaaatggaaaattactggtggttttaaattcttttttaatatttaaatttgatccaataacacatgaaaaaacaattgaaattataataactaaaatacaataaactaatagtctaataaatcttttaactgataatccggaatttgtacattttaaaatttctcttgctgctttccttttcttaaaatataaaattaatgtaataactgaaataacggtaccaataaaactccataagaaaacccataaataaaatacaacaactgaaatcgaatcacttgtaaatgttggtgaacatcctgtatatcttgtaattgaatatcttgtaaattgtgcaaaagtatgaaatacctgaaattaaaaatgggaaaattattgaacagaaaatttcaatacttggctttaaatatttatttgaaaaccaaattgttgtaattttatttgttaaaaaaatcattaataaattaaaactaacacatgaaattgttgatgaaattccaatagaaattgcaatttcaaatctaatcattaaatcacaccaaccttcacctttccatttattaataaaattatcaccaccccaaataattgctccaacaaatccatcaatcatcataatttctaaataaattaataatgtacttgcaggtatattcctgctcattatgtgccatgttaatggcggtatattaagtataaagcaaattgcttgaattgaaataaatgctgcctgtaatcccattgatttgttgctttaaaagagatatctttaaaagaataaccttccttttcctttctttttcatttagggattcatatcttcatttatttaatttgttttaaatctttttcacttgttttacatttcagtttgatgatgaaaatataaaggaaaaaagaaatctttatgtttcaatggtttctcttaggataccgaattaggaaataaaattgattaatagtaagagaatttctttttatattgtaataccgttactgttgcataaccaaatttaatacttattgctgatgtcgatatcgtaatataagaccttaacgggtgtttatatgatgtacaaattaggaaatgtaattgactaattcatgtcattgaaatgcaccttatcatatatacataacataagatctttgaattacttcattttataatctaattataatccccccttcatttcgtcttctccattttaaggtataactcaactatcgggacattaatggtatattaatcctgtataataaacaatcaagcactctctccctcttctttccatacttcccagcttaaatattacctaatcatcatctttaagaaaactaacaataaataaaccaacaaaacaaaaaattcaaaattcgcattcaaatcgcatttcataattgaaaaccgcttactaagaaactctgcgacttggaaatctccagatctgcctcgcctccaccaatttacacacaaatctaaattttaccatacaatacgtttgccaagtcgcatttagtagaaatttggtatattaaagaagcattacgtaaacttatccttatacaagtaaatatctagataatgtctataaaactcattcttttgaatacataacagctaatgatataaccataactattaatatctgtccaataaatgtaataaggtatctaaaacaccattttcgaaatgtagaattaattctataatgtgcattaaatgaataattgttatttttataatttttatatgttgatgattcatttaaagtttcagaacttttcattgcatatttattagagaatggattttctgaaataatggttgatatatcatcatcaatcttactcatattatccatagaatattcttccatttcattgatttgtaatttatatgccctgatcgatctaatacgaataaaccaaatataaaaatatgcaaatgggaatattattccaataataaatatctattcaataaatatcatgttagtattttatttccctgtctgtattttcataaatttctatacttacattaatcaaactatttaaccatggtttttgaatctggcatgcattacaaagacattgttcttcattaatttcatcaattgttgatgtattgctttcaagggtataataatgatttaatgttaaacgtggatcttcctccattttagttgtactttgctaattccagaagccttatttccattttcttatcgatgagtatagacttatctattgatatataaactattgtaaagctcatctcatatcaggtatcaaaatcataaaaatttccttttttggactcttcaatggatatcaaaaaaatttaactagttttcaaacactgttacattgtttgagtatagtttcaaataatatgttatatactcacgatgatagtataaaatagacttcgacatcaaactgaatagcttttgaaaattctatcaatggaaaaatattactttctcgatctacctccaagacatttatcaatatgagcaccaaatctactacctgcaattttacgatcacaatttgaacatttaaaataagtatcttgacctgtacctggtgaaattaaatttgcatattcacctaaaattttactattattgttcaatgcattaacataaatatctttaccattgagtaaaaattcaaaccttccaatatctggttcctcgtattgtttaatattatctgcattaaggttaatattaccaaattttttaccattagtattaacagaatttattttattctttttatacttcccattactctcttgattatttaaatttctttttcttgagttaggtataatttcatcttcactatcttcatcactttcatctttactatcatgatcatcgtcatcatcattactatcatcattatcattatcattattattatcattattatttgttctgttctttttctgtgaatcatcggtattcttcttattttcaaattttgctgtaaaatatggtgaattatgtagaattggtttatcaatagtaccatattcactccgtataattctctcattcagtaatgatttacttataatattatgaattatttgatcaagcatatcatctaagacgctaccacaaaacgattcgtatgttagtggtttggtttctgtcatttctctctatttctctttatttctttctattgctttctttgatataatcctaaaatatggtataagctaattgataataagtctttgcttctaattaccagaaccactctataaaatcagttaaataaacttcagtacaagagagatcaaagcaagcacaagaataatggagatacaaaagcgaaattttacctgtactttttatgttgaaaaattatttaagtaccagtcgttaatgtcttataccgattactgtctcgtttaagagatttgtttatgtattctgtagaacatgtatggcattaaaagtgttaaatacttgtaattatatagattatgtaggagattgcaaaacatcttatagttgtagacatattgcaacaattccctttaaatatacgtattttaaaaatcagtatgtcactgatcattttttagagtgcattacatgaaaaactgacatatacggttgacacaattgtatgttgcctaacacctttcacatttctttatctctgtaatgttattataaacaacattttagggggtatttaattaagtatggacattgaaaactactctaataatcaaaatggttcacccataacggattcaacacctgaatctgcatctgaaccaatatctgaatcaatttcaagttcaaatttaagatatagtttaaattctcgatcaagtgcaggtttagttacaattgactcagattctaatttaccaagtagagagacttcagcaattcaaaagttatcattggggaatggtaatttagaagaattctcagatgattcagatgaagaattacaggattggtcattattaaataatatttcaaagaaaggtatgaaagatttggaacctttattaactgataatgataaatatacattatcagcatatgatcaaaataaattaaataaggcaagaaatttaagatttcaagcattagaatctaagagaggtgcaattgttaatttagataatttaaaggcatctacaatttttattaataaggataattataatgatattttcatgcttcaaccaaaggggaaatttttagagacaatgggatttatagataatcaaaatatttgtcattttggatttgaagaggcattatatttagttgaaagaggtagttgtatgttaaaattttgggataatgaaaatgattcaaagaatgaaatatttgaaaaaatgcctcctctaagtttacaatctgcttattcaattttcattaaaaatgaagaacaactgaatcagtatatggtttattctatattgaaaagggatggttatattatcaatagaaatggtgaatttaatggtataatttcagaaagaaagagacaactttttgatgaagatacactatttaagaatgtagagatgtcaagatggacaaaattcttatctagtatttcatcaatatttaacataagtttcccatataagttagcattctcatattttaatatttttacatatatgagatccacattaaaacctcaatcattaccaaaacttaaaaatgttaacaatgaatcaacattaaacaatgaaagttgtaaagaatttaaaatatcctttaatatctggaaaccttcaccgaattttaaaaaaaagaatccaccattacctgactatcaaattacaatttttaaagcaaatcaaaaattaccaaattacttcgaattacagtcattattagaacgttcaaattcaaatccagatacttataaacctaaaccaaaagtaaggaaaaataaacctaataaagttccagacaataaagctaaaaaattagattcaagttgggattatgcaaagggtattaatatggaaaatcttaagtataatcaaaatcgtataacacttgcaattgttgataatattacaatcaatttcattacattatctcattgtagttttgttcaagaaggtccggtatggagagatcattgggttacttggaaaccacctgttaaaaagaaatctacgcgtaataatttcaaaagaaatgaaaaatttaaggataagaagtcaaatgaagatataataggaaaggaaaatcattctaaagatattaataatggagatatttctgaaaataagatactaactcctgttccaacaaataaaaaaattgagagcaatttactaatatcaaaaattttaaatggtgaagaaggtaatctaataacttctaccaaatcattggagaataaaccgccaaattcagcacatttttaagctatggaattatctttaagtgattttttattaatttatagacacaataacgtatatattctgggtaaaaaaacagttcactaataacgttctttagtgataaagtaaattgttataaaggaagcaaattaaaaaaaaatagcaccggttggtttcgatccaacgacatcagggttatgagccctgcgcgcttccactgcgccacggtgcttttcttgtgtttactttagctaagctttttgttgaagtgtaaaatgttcaaaaaaaatttcgtggaaaaaaaaagtgactaaaaatttgacttttaatgctgaggtgcttaataaaagatacttttatgtgtttaaaatattgttccctgctcagaatttagatttaataccatttttagcactttttaacacttttttaaaatttaaaacttttaaggaaatagtatagaaagacaaaactggagaatatttctggaaaatgaaaactttttgttgaacactaatttaaaaccactaataattttaaattctcaaaagaaatgcaaaaagagtctaattttgcatttatccaaaagctttttcaatcaacataacccaaaatgcacaatcaaccaatctttacaatgctctacataatctactcttccattaaatctctacagtatcacacaaaacaacaccaagatatatataacacctaattcataataacatcgataaagagaattaatgaattaagtaagctcagtcgtattaaaaatatctgaaaattcgtgtttaccttttccctttttcagttacctaatattattgatgagtctcttttatgttactgatatttggaataatataatgtttaggatcaaattataattataatctccttcattttcataatactctttgcaacatagactatcgtgagtcaaattaaaatcataaacatagttacaaatacaatcatataaaatatagatatgaacttagatagtggtcaatctaatctaaatgaagtagggaaaccgaatgattccaaatcaaatgaattaaaaaagttaaaagagtcaaatgaatcaaatgacgaaacccaggaattgcctagttttgatatttcagataattcctttgatggttcctataatggtgatcttgatttatcatctacacctgaaatcaattctagtaatgatagaaatactgatggaaaatcattatcaaagctttcaaatgatttatttggaactccaagaacaattgacacgagaacttctacaatgacttcatcaaattttgaattcaatccaaagttccagcaaagtgagcttcttattcaatcagctatgaaacaagaaataaagacagacaatacgtcaaataaatctgttaatcaacccactacttcaattacaaaacgcttaagtaggcaaagtaactatgaaatatcagtagataccgatacggagattggtgactataatagttttagaaattctttacctccctataaaactgagattaataaaaatcataatgatatacttagagagtttaatggtccagatatgattccttcaattactgaaataataaaattacaaaatgagttaacaaattgtaaagtacaaattaaaatacagaatgattttttacgtaaaatgtataatgaaaatacagaaaatagcccaaataaagaagaattgtcattagagttagagaagcaaattgctaacagtataagttcatcaaattataagacaaaacttgaaatattgaaagttgagtatgatagtctaaagcaaaatcataatatgatagttaaagaaaatgagaatataataaaccagttggaagctacacagttaagccatcaagaacaaattaagtcacaacttgaattaaaggaacgaatcaacaaattgttacagaataataaattaactatagtagatgaagttaaagatgaagataatgatgtaatacatcttttagataaccatatgaaaagcttaacaaaggaaaacttagaattgaaacatatagtcgatgtttatatcaaggatttaaaaaacagtcaaaagaaagttcaagacctttcaacacagttaaaagataaggatcaaagtgtgaaagaactacagtcagaaattgataaaaaagtaaaggaatctgaatccataaatgccaattatgaatttaaaatatcatcttttgaggaaacttatcaaagtcttatgacaaagttttcaaacctaaaactggaatatgacacactcaaaataagattaaatgaattgaataaaaataatcaaagtttgaagaaaaggaacgaggagttagaattaaaagtaaatgaaacaaataaaataataaaagaaaaagtcaaagaaaatcatagtttaagaaaactcaatgaatcagcaacaatggaatttaaacttcttttagaaaattcatcgagtttccatgcaattcttattaatttattaacaaaactgattgatccaacaacatctggtgatctgttggaggaaattaaaaatatcgataatgaaacaaattttgagaatatttttaaggttttttcagtaactcaaaattatgaaattgaagctttatctaatattatagagaattatactaatatttccgaaaagatgaaaacagagagtagtaaatcagataagattattgatttaaaaagtcaaattacaacattgacaagtaaattacattcattggaaaaacataatgattcagagagaatcaaaatccaagaacttgagaatgaaaactcaaaacttaagcttactctcagtcacaaatctaataggattgatgagttgaaaaagttaagactggaagatttatcacaaaaatggaagactgcagaggtggctctcagtcaaagtaaaaggggtgctcaactaaaaatttctgaattagaattagagttaaataaattggtaaagaagtttgacagtctttgatagatatttgtaactttacttcattaaatttaatttatataatacgagaatttttttggcattcaaaagtagttttattttaaaagagaaatgcatgattaaacagatattatactcctgttatataaaaaagagtgaattataaaggataggaaataagacagtttaatcatgattccatttcttcatcactgtcactgtcactatcactatcgcttccagcttcagcttcagcttcttcagcatatttctttgcttcagcaaataagtcagccggaacaactttatgaataccattagtttcagaggtacttacccaagttatttccaattcataatctttatctttattatcttcatgaactaaatgtataattcttgctgcttccttaactgcatctctagcagaaatatttggcagatctaatttttctaattcagcctttgcagcttgtctacctttacctgttgctgtaccttgataaccccaatatacaccacttggctcgaccatatataaatgtggaccagtttcatcaacacctcctacaattgcattaataccgaaaggtctaacagagttataacaagtataagcttgaacataataacctaatttacttataagtccttcaagtcctattggttctttgtaaatagatttaaaactttgtgcttcatctctaccacgattaacaaaatgtcttccatcgggtattaaacctgaatacacaacacctacatgtctgtcaattgattgtattctcttatttttacctggtgctaaaagttttgatgtgataattttctcagttgcaaaaacaacaccatcggcacacttgatacctaatgaagttcctgaattctcaacagcctttgaagcgtattcaacttgaaagtttctaccatctggtgaaaagacagagttagataaatcgtaaccggtaccaattgaagtctataaaatgaaaaaaaattatatgttagtatctcaatccattatgttaaaacagagcaatcttgaaactatctaattacataccattctatgtaatactgtgtggttttaaggagtttacaggaagaagttaatacagttgaagtctctctgaaagagtgtaaattgatttgccctccattaatttttgtcaacgcgcagtagtagagtgaatcttgaatttttactatggtacattcaattaaggacactttgctacatgtacattactgttatatatgatatgaaatgatactatgattagctctgtattactcaatttcaccattatcaatggacactataagagtggttgtatgtggagatgaaggtgttggaaagtcatcattgatcacatcattggttaaggaaaagtttgttccaaatattcaacacatcattccaccaatcagtattccaagagatttttcagattcaagatattctgtaaattctacgatattagtggatacatctgcatcaaatctatcatcattgcaatatgaaatacgtcaagcaaactcaatttggcttgtttactccgatcattatacctatgaaagaatttcgctatattggatcccattgttcagatctatgggtgttaacttaccaattgttgtatgtcaaaataagatagatttagatataagtgaagattcttcaaatgcattacatgaagaattcatacctttgttaaaggactttaaagaagttgaagcttgtattagatgtagtgcaaaggagaattataatgtcaatcatgctttctatttatgtcagagagctataacacatcctttgtcaccattatatgattataaagatggatttttgaaaccattagctatagatgcactcaatagaattttttatttatgtgatagagatcaagacggatatttgagtgacgaggaattctcattattacagcaaaaatgtttcaataaatcaattgatattactgatttacaaactataaaagatacattgaatacactagcaaaaggatctgcaaatgagatgggaatttcatctagaggtttcttgctgttaaacaagttttatgttgaatctgggagacatgaaacagtatggggaatattaagaacatttcattataccgattctttatcaatagatgataaagttctttaccctaaaattgatattcctccttattccagtgtggaattgtctccaattggatataaatttctagtcaatctattcatcttgtttgataaggataatgatggtggtttaaacgatgaagaacttgcatgcctattttatcctacaccaggtatacctaaaacttggaaagatactaattttccaagaagtgtggtttgcaatgaacaaggatatgtcactctacagggttggttggctcaatggtctatgactacatttcttgactataaaactacatcagcatatcttggatattttggttttgaatcacactctaattctaactctatttctgatgcactttatgttactaaaccaagaaagttcaagaaaagaagtgggaaagtttatagggcaccagtatatgatagaactgtttttaattgttttatcattggtgcttctggttgtggtaaaacttctttattagaatcatttttaggtagaacctttagcaatgttcattccccaacaattcaacaaaatgttgcagctaataatgtggaattaacaggtggtaaacagtgttatctaattttggaagagttaggagaagtagaaagcgcaatattagaaaacaaagagaagctagactcttgcgatgttttgtgttttgcatacgattcttcagatcctgactcatttcaacatttgattgaagtcaaacagtcttatccatatcttgataatattccaatagtttttgttgcgcttaaggccgatttagatagacaacaacagagatctgattttttacctgaaccatttacaaaatctttttatctttcaccaccgctgcatatatgttcaagttggacatcctcattgaatgaattgatgagccatatagttgaggctgctaccaatcctcgtattgcgactcctgggcttgaacccgatccatcagaaccagaaactgtattgaattcatttacaattggtggagctgcagccggatttatgattatggtaactgcttggtatatgcgtgggtatatacccggattcagaagataatatcatttactttagttgattctatgactttttttgtaacatttatactagtatgtaccttagataagcttaaattcattaatgtgtcccaaaagggtaataattagaatttatgagaccttaaaacttgaaattttcatgttgagaatctttcactttgagctctgtccttagcaaagatataccatcaatgatatgtaatgaatgaatacaccaaaagaagtatttttcataattaatacctaccgaacatttgaatgtcaatatattcaacagttttacacgttttgtttgtagcgatttcatatgttattgctatacatctaaaagcaaaatctggggatagaaatgatccatcaattattcaatcgagacttattagagcttccattgcttcaatcattttcattttattaactaaatatgttcttatatatttattacatacgattccaaatgaaattgccttacatcaaattcttggtttaaaaaatccatttactcaacattgtttatgccaagtattcaatactttaaaactatttatgatattatttatgggtcccttaagtgaattgatactatcttttatttatagtccaagttttgaatctagttatgatagtttttacgaagttctccgtgatttagtgattgcaccattgactgaagaaatattttacacctcattaacaactgggcctttattagcttataaattatatcaaagaggtggaagttctacatatgaacctaccgtcttccataatgataatagtatatcattaattttacaactaaatccactactttttggatttgctcatttacatcatggttatgaaatgtaccataaaggatatcgtttagctcaaattatcggtttatgtggtttccaatgtttatataccacattatttggatatttgaccaacttgatctttgtaaataccggtaatatatggtgttgtttcattgctcattcattttgtaattttatgggatttcccaacatttcagtaaagggaaatatcttccatatggtattttattggttcctattgatactaggtgtaaatagttttggtgcattgttcgacaaacttacatttatagaaaatgcttcttgattaattagaaaagtgtatataatatataaatttataaatgttttttttttttcgttaaaatgaatggtaatgataagattaaaaatatgattaagaggcagtagatgtaatagccaacttctgatcattagaagtttctggcaaaacattttcatctgcattttcttgctcttttgattgtatccataatgtatgattaactaaattcaaataagagtacatgaaattactcaacaatacttgttgtcttaatggtctcttaggatctgcaagtttcaaatgactgagtctataaattgcacgttcaacatgtacagggaatctatgatccaacataacgagagttgattgtgaaacgggtggaagtggaaacccaaatgccgagtctctcatttccaatggttgattaggttttgtaggtttttcattttcatctaatgttttctttaatgattgtttgataagttctgtagattcattattttcagttttttcatctttagtatcagactttataactttaacaagtgaaccaattgaccctttatttacagtgttatcattttgttttgtctcatcagcagtgtttagttcatctgtgaatgtagaagatacaacatcagtaacttcatcaacttcggagctatcatctaatctttcttgtgataaagacgagtttgcaaatggactatgatcagaacttgtggattcttttcttaaagcaacttttttgtcagttggaacctcttcaactttaaatgtatcattggcttccgtttctacaatttcaacaggtgtagttttagagacagtttcgttttgttcctcaaaaacatctttcttaacaacaccattactttttggagaaatgttcttgacaggattcagttctttagcctttacagcatctttctcaacaatttgaacaacttccttttcctgttctttttctttacgcttttccttctccttctctttttccttcttttcaacaagactatcatttgatttattcaacgtaaaaaatcctaaacctaatttaggagatgatccagcatgagtgcttgtattggtattcttggtaacacttggactactgttttcaatatgattattagtattagttataactcccttctctgtatgtaacttatgcttatccttttctttttccttctctttttctttcttaccaccaaagaatgatttaaaatcagtttttggcgagcttgatccagattcagaagtatgtgaaaatgtacgttttgacttgaatgaaggtttcttctcttcagatgtatcaatggaagttactgaactactacgtggtttatctcttttaattttgaaaaatgaagtaaatgatgttttaccttttgatttttccttctccttctccttttctttatctttctcagcttcttttaccttttctgcgtttactactggtatttcaacaataacaggggaaggtttaactttttcctctattattggtttggaattgccttcattgataacattaaccttaggtttaatactattctcttcagtaacagttgtagtagatgtatgtgcatctctggaaagtttcgattgagtgtctgataagtgaatttctttcaaatccatgccatatctgtttctttgatgggatgaagataggtgttgattttgttcaacagcatgatgatgttgttcattttgagtttgatgagttttgcgactttgattttgattgttatagactggaacagaaactacggattttttgaattcagaatcaacaggtgatttcatcgaattgtcataacgttgatgggagttggaaatgttttgatttggccgtaaatgtctatctggaacacgattttgaggttggttattataatgattattacgttgatgtgatgatgattttgatgatggtttactttgttcatgatgatgtagaggatattgttgcagaggctgttgctgctgttgttgattgttgtgttgactttgatgttgaggtgaaaatttttgtttctgatgttgatgtggaagttgatgttgttgttgacgcggaggtaaattgttattatgacggattggtatattttggttatttcttgaaccattaaatgattgtggatattgttgataattttgacgttgatgatttatacgattatttggaattttattaccatgatgatttatatcatttctatgtaaatttgatgaatatttatcatttaaagtttgaccagttggtaaatatggatttataggttgattagatgttggtgatgtattagtaggagaagttgctgtatcattagatgttggaatatcaggtaaacgacttgaaggagacttaagttttattggttcaagttgaggttttcctaaaggtttttgggcattatggatttttcttatatctttatatacatgagcctgtggagctttattatttgttccaatgaattgaggtaaatttggaagatttggtagtgttggtgtagagttagatgatagatttgaattttgagaaatattttgttgtcttctataatttgtccaaccatttctttttaagttggaaacaaaatcaggaggcactgaatttttatcattttctagattattatccatatcaatcagatcatctcgatcaacattatttaaatcttcatccttaataaataaactctcacgtgttttactattgttcaatttatttcttaacaatatttttcttgacttcacacgagataaatcaccagaggatttacttagtttattatcattgttattgttagtatagttaatattattattgtttctattattttcatgatcgtctattaaatatgcttctttttcaattttagatataccaatcgatctagtagataatgatcttgctaaagtaactgcatcatcatcatttaaaccagcattttgagaaagtgtttgtaattgtactgttaattctttcaatgaaggatttttcattgttatatcatcaatgtcatgattattaataatattattattgatattatttttttgtacatgctttttaaaattttcaagtgaaatttcaggatgagcagttgcaggtacccaaattgattcatcaaatacatgatctgattctaaatcaacaaaatctacatcttgattatcaaaatctaaatcattttcatcatttgatattaagatatttggagattcctttgaataaatacttttatgaataattgtttgattatctatattatcaagtgaatcattaaattctattaaatttgaatcgttattattttcactttgatatgacttgtcatacgagtcattagaatttagtgaataattatcattatcattatcattattattatcattattattatcattataattatcatcatatgaatgaaaggaatgatttgaagatcgagaagattgagaagatcttgtgactgaatgtttcgataattttgattttgatcttttcaaatttttttgttgtacttgaatattattattaattgtatcaatatcatcattataataattttcagttgttggaagtggtagatcaggatcaaaattaagactattaccaattgataatcttttaagccttctaacagcattatattcttgttcaactgcctcagaagctgcaattaattcctgttgtgatgattttttaggagatgtcctctttacttccaatctagccactccagagggttccattgcaattgagtgataataaagtaagatagaagtaaaagataattcagaaaaggatccctaattccttctagcaaccttggaagacatcgggttgtgttatttaggcttttcaagggttattattatggaaaattgttgattctcagattttcaaacatttcgcgtctccctcttttctgatcggaaatttagaccgtgattgtgatttaccagtgagtctgaaaattgcgagggagtgagaatattttcaaatttccgatcaactcattccacgacatgaaaatagtgactcaatttctatcgactttttcacttcatttcatctcaccggtatttcaaatcggcatgattaatggaattaaatgattacatctttttttttttttttgattttcaattattatttgttatttctattgaggtaaggtatcacaatcatggctagagagtttacaataaaggttccagcatcctctgctaatataggtccaggttttgatgttttaggtataggtcttaatttatatctttcattatcagtttccgttaatgaatcttctccatctgaaaaatcaattaatgatccttataatgttgatttatcttatacaagtgaaggtaataatgatagtgtaccacttcaatctgatttaaatttaattactaaaactgctctctatgttttacatgcaaatggtgttcgttcatttccaaaaggtactaaaattaaagttaataatccaatacctttaggtagaggtttaggttcatcaggttctgcaattgttgctggtgttttacttgcaaatgaaataggtggttttggttttgacaaaaatagatgtttagattattgtttaatgattgaacgtcatcctgataatattactgctacaatgatgggtggtttcgttggttcatttttacgtaatttatcaaatgatgaaaatgataaagttcatcaagatttaaacttaattttaccttctccacagacttcacctgattttattccttcaaatgctcctttaaatttaggtactcatgttaaatatccttggaatccaatgattaaatgtattgcagttataccacaatttgaagttaaaactgaagattctcgtaatgttttaccaaatacttatgaaaagaaagatgtagttttcaatttacaaagattagcagttttaacttcagcagttggtgatttaaaaccaaatccaagagttatttataattcaatgcaagattctttacatcaaccttatagaaaagttttaatacctggtttaactgatgttttatcaaattttacaccagaatctcatgatggtttactaggtatttgcttaagtggtgcaggtcctacaattttatgtttagcaactaaaaattttgataaaattgctaatgatataattgaacaatttaaatctcatgatgtcgtttgtgaatggaaattattagaagttgcaaatgaaggtgcaattgttgaacattcaagtaaattatagtcactactaattttattactactgctacactttaaatatatccacaaaaaaaaaaatgtttgaaccgaataaacttatttatttaatacgctgtaatttatataaacttatggtatcaatgtcaaaacttgataaaggaatattagttttgatcatatatacaaaagaaaatctttactattctaaattctgacactccaaagtttgtcaaattggaaaaagaacgaccaactataccacacagaactttgtttcttattcttttttattagatttatataatctgctatatgcttatacgacaatattagatatttaatgaacaaacacacacacacattttatgacttgaccgtgtatttgtagagtatatattattaatttacagtttgaaaggataaaataatctataccaaaagaaatcttcaacttcttttgaattctagttttcaacaataacagcaattatttaaattcaccagctttacccgccattaataaaccaacaattaaaccgaataaacctaaaacactaccaaaaatttcaataactaaaattttaacaaataatgaagaatctgctgcatctgaaattgcagccgttgaacctgtaataccaactgcaacaccacaaattaaattactcattccaacggttaatcctgcccaaaataatgaatatcctgtatataaattttctgcagttaaaatattttcaacagatgtaagttttgatgaaaacacaattgccataataagtccataaattgcaacaacttcacaaaaaataattgagattaaattctttgtagtaattcttggtgctttaacaccagctccgagaattgttgaacctgttacaaaaataccccatgctgcaccaacaactgaaaatccaatacatgatgcaatacctaagttagcccacatatatggtgaaacattctcaagaaatgctccaaagttaaattcttcaccagaaccattaaataacatgtctaaattaaaaaatttggttagtactcctgtttttctataatctataggaaattacaaatgagaataatacttacatcctccaatggtacataatgccacggttatgattaatgtatagacaaatgacattattgttgtttatattgttgtctattgataataatttgttgccctatcagcacaaacaatttgaaagaacttttaaactctgatacagtttaaactgcatcaatttgaattgtacgtaacttcatgcagacaaaattcatgataaaagcagcctttttaaaatcgtcaaaagtcgcgactttaaaagtttatcattttcatttttatcattttattttgcttgtaaattaaagatttctatacaaaaacttaactattataattaatctaatctatatcaaactgtatcagcgtatgctggatttttcttaaggattacaacaccttccaatgatgaactgtaagaaatgtattcatcagtttcaagttcagccttttctccatatcctaataaaacaggtgtagaatgagtaacccacccggtaatagtctttggtttaccagcaagaccaacagtatcaactgcttgaccaactcgcacattaacattaattggttctaagttttcatcaactgtaactaacattcttggcttgattgctggagttaaatagtataataaattggaattagaacttaaaatgaatgattttggatctaataatgaaattgaaacagttaataatgccgcaagagaaactttggataaactttgcttatcaattgaaaatggatttaatgtaagtgtacctttacctaaatgaactaaaccttgtgatattctagacataaataatccattttgatcattaatataatatgatgctaattgtcttaataattgtgctaatcttgcattatttgtacctgcaccaactaaacccattccaaaaattgcattatatgcaacttcaatatcttgatcatgtgaatatcttgataaagtttcgaaaacattaatttgtggattacttgcagatactaaacccatagcaagtggaacagctctctttattattgatttaccataatgcattaaatgttcaaaatgacgaatgctcattgcttgtccgatttcttcacccatacagattaaggcaagacctaaaactgcaaaaccttcgtaaagttcatcctcttcatcttctgtagtttcattattatcatcattagttttactgtcatcatctttcttttcaggtagcagagatgttgtagcttcaccttcaataactgatttcttaggatcaacaggtacatctgcaatttcaacatcattatcattatcaacactcatatcacccccatcacctaacataccttcagcaccagctgctgcctcaatctcagcttctatttgttcatcatcatcatcatcatcatcatcatcttcgtcatcatcgttagattttgatttggtagtacagatttgtaataattcttgaacttgtaaaacattaccagttccagcataagaacaaattttgattaaaactttcaaagatttggagattggatgttcaatagcatcaatggtatctaaaacatcatcaacttgatcatatttacccatataaagtaaacctaaacctaaacacataaatctgatccatttggaagtgagttgttctgagtctttttctaataaagattgtaaaatagtatctgtaatatcaccattacatgtaccaacaaatgtatgacccaatgataacgcagccaaggattgaatttcaatagaatatacaggatcattaactatagtagttaggagattcaaaacattttcattttcactacctgcatatgcaataccaagaccagtaattgcagatgttacaattatttcatcactcttttctctattatgaataaattcttctaataaatagtaagttgattcaacatcatcataaacaccattagttgaaatacccatacctaagaccgaacctgctcttaatttagcgttttcattatattggaattgatctaatgcttgtaaaccattttcagtattccaaaggttgactaaacctaatgatgcaacagttgataacataccttcatcctttgttttataaacccatttttccttagagattagtttttcatcactataacctgcattcaaaaacccattaacaaaagatgcagctaaattttgctttgcactttcgagttttgaagctgatgcataaaatgaagtttcaagatgagatttataaatatcttcaggaactttaggagctaatagatttaattctgtgactaaatacttaaaatatttatgaagatggttattattaatacattgttgaacttcttcgtcttctactttaaaaccataattttgtttacctaaaatgaaacctaattgctttttcaccaataaatcattagttgattcaaaaactgatctgaccaatgaatcatcgcctaatcttatagctaaagttaaagcttctggtaacttattatttgataaatagatagtaaaagcagtgtttaagaatgctaaatcatcaggcggagctaacaatggaacacatgaaatcatgtatgtacaaactctcttgtaagtatttttgtcaacatattgtgttattttttcaacttcctcgatttctagtaataaatcgactgcttcagtttcagcattatgctttaagaaataaggtgcaataatttcacttaattgaactaatggttcttttgattcaccactatcaagatttgcttcatattgttctccaatttctaaacataaatgtcttagatattcatgaccccattcggtcatagattcatcaatattacttttcaatctatacttaagacattctcttacatattcttcaccatcttcggtagagtaagtcatacctaaaacagataagatatcatataattggatcagtaaagattcatcagcccaagaattttcaagttgagttaaagctggataaaatggtcttaagaatttcaatggttttggaacagctgtcattgaagatgtagaatcactaatcaaagttttcaaactgttcattgcaggattgtaaagatcagattgtgttgataaaagcctatcgacaagcatttccaattgttcttttagttgttgatcttcttcacttaattcttcttccttcttttcatctttagttgattttttagcatttacatcatttttagaagatgatgcatctggcaatgcattaacttctttattttccttttccacaggcgccattcttatactttaaacggtctaaactgtgatggatttgcctttctaaagtgtcaacgaagagctaaagcaaatcgaatctacgagtttcgcattttgccaccctaggttttctctcagcttttttttcagacacagttaattgtcaattgttacgtaatcgttaatcaccacaatagcttggaagtagttgcaatgtagagtaaaaccatatgaatgatgtacattacaactcctgttagtagattagtgttattacataagagtccaaaaatttataaatattctacactgtaagcctaatttgaaattagagatagataatcaaggatcttctgccaaaagatcattaataacccaagataactcattcggagttccaatatctttatcacgtaatgccaagtttgtatttgatgattctgatcctgatcctgcagcattcggatcacctatacgctcatttggtttcaaaagatgtgaaatatcggaaagtttatttggaataatgtaactgtttagaccattaaaaccagtgtcagttattactctatcaatttcggcccacatactattattttgtctcttggattccataacctcctcagcaattatatcataatcatcatcatttttaagtttattatcaatcaataaatctaatgtaccatatggttgaatcgtatagggagttaaactaaatgaatcaaaaacatcttccgtcgttatagtgaatttccttctttttgttcgactatctttattttcatcaagtgtgtgttttttggtatcatcattttcaataggttcattagtgttctgtatattgttttctttctcgagtttagtgtcttcgcttttatctctattcagtacaacattttcttctgcattagtggtttctaaggtcacttcattatcattatttacttcagataaattttcatctttggtatcttcggattcatttaattttcttgtcgagctagatgttatcgtggttgcaccgtcatcttcatcttcattttcattttcctcttccttatctttttcgttattttcattttcatttttatttttgctatctttatcctcactatctttatcctcattttcattattttcagtagcttcattgtcttcattactaatttcattttcattagtaacttcatcaccatgatattcattattttgatcaacatcataatcatcatcattatcagcatcgtcatctttgtcttctatgttagtatctctcacatttatcattccagtttctatttctaaattagtggcatcatcatcatcatctaatgattcttttactttcatattgtctattatatttgaaattattgactttaaatgatattgaagaccaagatacaacacatcaacagctttcattgaaacaccacccagcaatccacgctctcgtgcaaggcctaacattatatctctcattcttttcctttcaggcaattcataagtttcagagcataaaggttcattaaccatatctaatatatctttaacagctatcattgtcatttctaaagtattagttttattaacagattgttgttgaatatttgcatcatttgattttggtgaaccatttaaacttgtagttgagttagaattattattgacttgttgttgatgatggttatttgtaacaattggaacttttggaactaatgcttgtctactcatagccattgaattttgaataacacttctctttgttggatcttttgttataccttttatacgaattctttcacgaattgataatgataatatatctttcttaagtttttcatattgtgaagatgttgtacctgattttcttttcttggaggcattaccgaaaacacttgatgttacaccatcaaagggttcctctctataacaattggccagtatagataataatagttgattatgcattttacttgtctcctcattttctaatacaaatgaaatatcttccattaactcttctctagataatctaccaacaatgaataatgacaatgcaatttgataagcatcccattttttcccaagtattttttgaaatatcgttacagatttaccaatttcaattcttttagttgtatcatcatcgtcttcatcatcgtcttcatcatcatctcttatttcagataatgcattatcattttcaattttaacagtggttgatatctgattaccgttattattattattagtattattcgtaattgacgcatcgattaagttattttctgttggtggttttagagaaggggataaatccaactcatgctttgaatcctgagtaattggagtagcaagcattatctatgtttaaaatactaccaatactctatgcttacaatacctgaactaataaaagattcacaataattattcagttttagtttcagtttcaattttagttttaacaatcttttacataaacaaaatttcatcaacggaaattcatgttgaatttgaaaaaaagtaaattacgtaatatttgtaaattaaattataggtcacgtgattaatactttttaataaaaaaatataaattacgtaatacttgcatgaaaaaactaaaaatagtaacaattagtggctgaaatcattctttggcacacaccctaatattagttttaagtctgtgaatttttcggatcactatgtaagatttaagaataaaaataaataaattcacttgaataatctatttttactcttgtttttatttcatttccattttctttttaacctggttctatctttattctagctatccatactacaaagaaatgtcaggagctgtacaggaattcaatccggatatgtatcatgcattccgtgtattcaatcaaaaattcgtcgttgataaacgttttgaattaataagaggtttgggtcaaggtgcatacggtgttgtttgttcagctaaatgtaccgaaactgaggaaggtgaagataaagttgcaattaaaaaagttacaaatgttttcagaaagaagattttatgtaaacgtgcattacgagagattaaattattagctcattttagaggtcataaaaatatcatattcttatgtgatttagatattatacctgattctaatggtaatttcgatgaaattttcctatatgaggaattaatggaatgtgatttacatcaaattattagatcaaagcaacctttaacagattctcattatcaatcttttatatatcaaattctttgtggtttaaaatatattcattcagctgatgttttacatagagacttaaaacctggtaatttactagttaatgcggattgtgaattaaagatttgtgattttggtttagcaagaggttattcaagcgatcctgataaaaatcaaggatttttaactgaatatgttgcaactagatggtatagagcacctgaaattattttatcttttcaaggttatacaaaggcaattgatatatggtcagttggttgtatattagctgaattattaggtggtcaaactatttttaaaggtaaagattatgttgatcaattaaatgaaattttacgtgttttaggtactccagatgaggaaacaattcaaacaattaaatcttcaagagctcaagcttatatacgttctttaccatttatgccaaaaattccatttagtacattatatccaaatgctgaaccaaatgcaattgatttattaaataaattcttaactttagaaccaaataatcgtattacagttgatgaagctttgaaacatccttatcttgaagtatggcatgatccaatggatgaaccaagttgtccaaaaaaatttgattttaaatttgaagctgttgatgatttaggttcaatgcgtgatatgattctgcatgaagtacgtgcatttagagaatttgtacgtcgtccatataacagcgatgatgaaatattcgattcatctaaatttgtttataatacacaacagcaacaacaacaacaaatgcagcagaaatttcaagcagagcaacaagaacaatttcatcaacaacaacagcaacagcaacaacagcaacagcaacagcagcaacagcaacagcaacaacagcagcaacaacagcagcaacaacagcagcaacaacagcagcaacaacagcagcaacaacagcagcaacaacagcagcaacaacagcagcaacaacagcagcaacaacagaagcaacaacagcaaatgcaaaaccaatatcaaatacagatgcaacttcaacaacagcaacaacagcaacaacagcaacaacagcaacaacagcaacaacagcaacaacagcagcaacaacagcagcaacaacagcagcaacaacagcagcaacattcatacatgccatcactaatgacaccaacagggtcattgcaatatattgatcaagacatgcccccacatccagaggagatgatcttcaacgactctacaattgaaaatcttgaacaagatttagcttttggtcttgatggttatgcttaccaataattttgctaaaataaactattgaataaaatttgtaagttaaatagattttgaatacatttttttaactaaaattctaaaaaatattataaaaattaatattatttttattattatattaatacacaaacccagtaaataatttcaaccatataaatttataaaaaactcttcatcaatttcattcatattcttttttaatgaattgaaactgtaaatgttatcaaactctccatcaaatgccctctttaaccaaacaaataatctatcatagacaattgtaccagcattatgccaacgaatactatgatcactatcagggaaaacgtacatatcataattttcaactccatttaaatctaatgaatcaataaactgtatactattttggaaatgaacattatcatcaccagttccatgcattaagaggaatcttttaacatctttaaaattctcaaaattatgaacacgacttccattatatccttcaaaattttgttcaggggtatgcatatatctctctgtataaactgaatcatataatttccaatcagtaacaggagcaactgacataccatatttgaaggttttaccttgatcatattcaagagttttcaaggtcatatatcctccatatgaccacccccaaatagctgttctttcaggatcaatataacctttaatattaatccaatattttgcagctgcaacttgatctaatacttcatgattacctaaattatcacgaacaatattacggaattttttacctctaaaacctgtacctctaccatcaactgtaacaacaaccgcatttaattctgctgctatgattgacgagaatgaaatagcaaacgatttggaaataagttgagatcctggtccaccataaacgaaaaataaaagtggatattttttacttggatcaaaattcaacggtaaagtttccttataattaacaattaaatcatcatctaatgtgatattaccatagttattttgtggaatatcataagtatccaaagtattttgtaaatcatcatttgaagaaaattcatatgatgagttttcatgtaaatccaataaacgctgatttggaacatcaggtcccatatatgaaagtaataaatatcttgcacctttagagaatgaaatatcataccatgcctctaattcaacatctgtaatattttttttatttgaaccatcaaggtttactgaataaatatgtctttcaattgatgatttttcagttgatacataataaaccttatcagtaacaaaatcatatgctgcagcaccattaacaacttcccaatcacctgaagtgagaataacttttggttcagatgatgctggaggagagaaataagccaaatgatcatatccattaacatcaatcatatcaatataaccatcatattgtcttttttcagattttggaataaaaatagtattatgagtaatttcaaaccatgatttatcatttcttccatcttcaaatctacttacaattgaattaatttctaaagtatccgaaggacaagaaacgataaagattttcaagatatctgattccctattggtaactctaaccaggacttgttgattaccaacccaaataacttcagttattaacttattataattatcaatatctttatcattatagaaaggatcttctgaagataatgattttaaaacctcattttcagtatcgtagatgacaatatcaacaattgggttcgagaatcctgcctttggatatttaatttctttaacaattggataagatgatctattatttgcatcttcttgaacaaaatatggaattgggaaagttggtacctcagtatcatttgaacgtaagattaataagtgattagaatctggcgaccaccataacgctgaatcaccttcaaaaacttcttcttcataaacccaatcaggtttaccattaaaaatttcagaactaccatcagatgtaatttgtttagtaattgcgttattaaaatcagagatatcattgatatagacattattgtctaaaacatatgaaattttttgagaatctggagatataatagctaatgcaatttttgaattatcatcaatattattagatataagaggttgaatttccttagtttcaacattatagatgaagtaagaagcaaaatatgaatgtctccaattatgaactttattacatgtaagtaaagcaattttcaaatcattactaaaagtaattgattcaaccaagtaggatttactttcataattaattgaatcacctaaatcatataaaatagtggaacttgtatcattttgtaaactttttaaataataattactatcatcatcaactactatataatcaccagaatcatcagttaaagaatttggagtttgaatccactgaatatctttgatatttggataaaaagtaccatttctaacagcttgaaaagttaacggtattttaccatttccattagatggttctaaaaatagattttcatgacaatcagtaattaaatcattattggattgatatttatcaatattttgtaaacggacttgtttatgattgatatagagactattgacttgagataataataaagttgtaccatatattatcgttattgttatcagggaaatatatttccaagatgtagtagattttataggaatgggatgctccttatgataagattcaaacgagctcattgtttagctgtgtttgattaatagcaaataaaactttgttaataaaaggaagtgtaaatagataaaatacagcagaaatagagcagatatattgaagaaaaagaaagaaaagtgaaagaaaaaagtttagatagagattagctatatcaaagtaattaattatcgattgcaaaatgggctttgtgcgtaaaatttcctataagttgacactaaattttttttaatttattggggtggcaggttattataattattataaagtgattacgtcatatatactatagatacactttatatcatctatggcttctcaatagagacagtgtttgcattatcctttgcactctttaacattgcatcaacgattgcaagatgatggaatgcaacttctggccaacatataatactacccttttcaccagataactcttcaccaagtttttcaaattctgttgctgtaccccaattttcattttcaattttgatttcaacttcatttttttcatcatcacttgttaaaccacctgtacgtaaaataaatctatcaccagtatttggtgaaaaatcgtagtaaatactaccattatcacctaaaatttcaaaataaccatttttctttttattaccaaatgcactaccataattaaatgaaccaacaatacctgaattcattttacataaagcccaaacaacgtcaacatcaccactttgtggtctaacttgaacggtacgtgcatttaatgattcaacatcacctaaaactgatgttaataaagctaattgatgaactccaccatcactcaaaaatcctccaatatgttgaggattttgacgccaagttgttgttaaatattgattattaaaattaaatgaaccagttgaatgataattaaatccaacaactttaccaatttttttaattgcatcctttaattctttaacggctttaagataaacccaatgttcatttactgcaattaaaacttgtggattttccttacttaatttaacaatttcacgtgcttgatctaaattagctgcaattggtttctcaattacaatattttttgaatatttaattgccttttcaacaatttcaacattatattgaacaggtaataaagcatcaattaaatcaacatttggatctttaaatgcatcatcaatatcagaataaacttttaaaggtggatcagcttttttggcaaattcttctgcctttgaagctgtacgattataacatgagattggtgtaaaatattttgaatttgttaatgatggtaaatgtgattttgtagcaaaaatacctgtaccgataattgcaactttagtagtttgttgttcagacataattgattgttttaattaattgattgtttaatatatctatatatatatatatgaaatcaattacctatccatcataataattatactgtactcattgctgatatttatactaatttacatacctcccagccatgttcaaatgccaataagcatcggagataaattcggcttgagcttccccgcttagtgaaaagaccgagaaaagacgcgactgagaggtatccccactataaagattaacagtatgaatatatatcaggagataatatcaagaggtaatactaagagataatatcaggagataactgtgttcatttcataaaattgaggggaattaagtgtggaatcgatgagattgtagagtcccttatcttctcatatcacatttagttgtatattaggaagatataataatattatctcaatggattagttatatattcaatacacagtatacaaataaaaatgaacataaaaaaatagtacatagtcaactgaagaaatacaactaactaattaagctcttacctgtttaacaggaatattgagctattgattaaattatataattttgaatttaaagatttaaaccattttattattatcccaatggatgattctaatctactctaccatactctattgtataatttaaaatcagtattaccgttgaatagtgttctaacttaattagatagttatgtttctcccgttggataaagaagaagtttatactaaggtattacttaatacaaaattaataatcgatgagcattctaattaataaagaaaaatgagccgccttcattattggcgtcgatgggactgccaagccctatttttcttaccacagaaatttgaatttttttttcgagaaagtagcactgtacgctattagtatttaatgtgaacatgaatttcagttgaatttcactggtgattggattaattaaatttattaaatttaatcaataaaccaaactaaccatgaactctattaaagcagctaatcaagttttacagagaacaagtgaataccttaattctggtcttgtatcatctcaacctgcatggtataaagcattagcttatcatccaccaaaacatgcctttaataaaactgttcgtcaagatatacttgaaaatgttaaaaatgaagaaatttctgctatttctgaaattaatgataaattatcaaatggttattatattactagaattaaatcattaccaaaggaaaaagttacaaaacttttacgttcacaaaaattacattatattgaagatgatttacgtttattattttataaacaacatccttgggaattagctgatgctaaaaatatggttgaaaatgaatataatttagcaaatattaattgtgattggagtcatttaagacaatttaataaaaaattagatggtgaaagtgtagttcaaagaactttatatttaatggataatgaaaataaacctttattacaagcttatgaagaatctaaatttgaatattatagattaaaaatacaggatgaaactgaaatgaatataagtagagaagaaagtgaaatgtttggtgcaatttatccttcaacttatattgaagatggtttcgcaaaggaatctgaagtattagaaaaatggagttctgatgcaattaaacaaaatgaaattttaagtgctaaatcaaataataataattcaagttcaacagcttcatcaaatactgctcaacctcaaactcaaactagagctacaagatcagaagatcaaatttttgatagtttaacttaatcttgaattgtcttcttttctgtttatataaacattattgatcaataataataatgataatatatatatatatatataacttgtctatagaataaacaaataataaataaatatacgatacactctatttacatgaagctaaatgaacttaaatccatttcttttcttctaattttctcttctctaatctcttcttatatttactacctctatatttgattaatacattatctgcatcagccaatgcatccgcaataaccttctttctagcctcatatgttctttcccatttatgtccctttggatataagacaccctttaatattggtgatgatgcttgtttatcttcatagaatttcttatcattcgcaagttttggcattaaatctgcaattccaaatttataggctaatttatataaatcactttgacgacgtaaactatataatggttcatgtatacgtccagttattggatgtttattaggtaagaatggatttgcatcttctgcatttgttaatgttggttgatctgcatattttctgattggtgcaggtgggaatttagtgaaaaagttttgtaattttactggaagctttgcaaatgcttcagcagagttcacgttgaataatttagttgcactcattgcttaatggacaaactcttgaactctttctaagtatcaggaactaacctttaaatttcaattttcatgtctactaagaaattatttcgaggaacgaaaaaaaattattccaaattttaatggtgcactgaagtagtgtgttttgtatgggatatggtatatctgtaagttatagacgatacttattacacaatatactattaattatttgttaaacatcataatgatacactcgttatgctatctgtaaaaaaatctatttgaaaaactgacccaatcaacccttagcaccctatcaataactttgactcataatagcgcgcttaattatgacaaaattacctatttaagtaactgctcatggcggttggaagattttgacattgaatttatttccagtttttttccaatttctccttgggaagtaatatatcacttcttttctactttttaagtattttattcaaacaaacaaaaaacaatgttaaagtttacaaaattatcaagcaaagtttctacatcattttcaaagagatttgtatcatcaaccacttccgaattattaaaggaaaatgttccatttgaagttacaacttattcaagacctgatatgattctttcaaaggctaaaggttcatatatttacgatttaaatgataaaaaatatattgattttacatcaggtattgccgttgtctcattaggtcattcagatcctgaaatttctaaaatcttatttgaacaatcatcaactttaatgcatagttctaatttataccataatccatggactttagaattaagtaaacaattagttgaaaaaaccaaacaatttaatggtatgagtaacgcttcacgtgttttcctttgtaattctggtactgaagcaaacgaagctgcgctaaaatttgctagaaaacatggtaaatcaatctctgaatcaaaaactgaatttattacttttaaaacttcattccatggtagaacaatgggtgcattaagtgtaacaccaaatccaaaatatcaagctccattttcacctttaataccaggggttcatgttgcaactccaaatgatattgaatctgttaaatcattaattaataaaaatacttgtggtgttataattgaaccagttcaaggtgaaggtggtgttcatccaatggatgttgaatttttagttgaattaaaaaaattatgtaaagaaaataatgctgttttaatttatgatgaaattcaatgtggtatgggtagaacaggtactttatgggcacattctaaattaccaaaggaagcacatccagatattttaacaatggcaaaagctttaggtaatggtttcccaattggtgctactatgattacagaagatgttgaaagtgtattaaaagttggtgatcatggtacaacttttggtggtaacccattaggttcaagaattggttgtcatgtcttagaaagaattgcaaatgaggagtttttagcaactgtaaacaaaaagagtgaattattaaaggaaaaacttgcacaattaaaggaaaagtatcctaatgaaattagtagaagttagaggtcaaggtttgattataggtgttgaatgtaaggaaaatccatctaaaattgttgaaaccgcaagagatttaggtttattgattattacagctggtggtaatgttatcagatttgttccacctcttaacattgaagatgatgttttagttgatggtgtcaaggttttagaacaagcattcgatttaacttttgcaaaataaataaataattagatgctatatagagataagaaatatttagaattttttttgacttttatttacattttatatttttataaactatccttaacatgtacaatacaaatttgttagcgtttagtccatgtttggttattaaacatgtcaaacatatctgatctcgaaatactagaactatcaatttcaagtgcaatgtaaaatccactgattaataccagatataagaaaatcaaaattgaacctttgaaataattactcttaccttcagtataaatgtaagtgaacatataaacaccaaacaatgttgcaataaaatcccaatgtgggaaaataagtgggaatattttatcaataccaatatttaaaacatctttcaccttttgtgtatccaataaactaacaatacctaaaactggattatcaactggtgtagcatctaaatatgaaattgtatttgactttgattgtaatcccaataaagatgaaagtcttggtaatccaacccaatcattcctaactaacagttgtaatccatttgattcacttgaatatttggtaaaattccagacagaatacaacataacaattggaatttgtaaaagacaaacttgtaatgcataagcactaccaatttccatacttaatgcaacattaccatgcattgcaaatgaaaatgcattgacaaattctgtagtgtttggaacaagtgcaaaaatagttaaacccaaaaacttcggattaattgcaatggatttaaggacatcatcaacacaatcaactaaaatttcagcgattattgcatataataaagttgcacctaataaaattgtagtagattttgttcttgaccagttaggtgcatcatgtccaccttcagctggtgcctcaaccggttgttcttgtatttgcaatggctgtgtggtttgtgcaacttgatttgaggttttcaatatatctgcagctgatggtttggtattatttattgaaagtcttgatggtctctgtgatgctacattattgtttgtatttgaaacattaggcgattgttcattaagattgaatgaatttatactatgattttcactaattggattggtttctgttttcttttcttttgatgaagtattaacggtgttggaccaaatcagcgccgcatgagttttcaatgtaaataacaaacaaatgcaataaactaaaaataaactggaagcacaaataatagtaaatggtcttaaatagttaatgtataatggatcaataacaacagatgattgatagtaatggcattttctacaatcatctccaaatttaatttcacaaggtgaacatttgactttatattcaccataaatttggtataaaatagttggtgaaagcataacaataatagcatataataacattgttgatgaaactcctgcacttgctggattatatctttgagtttttcttcttatagcaccaaaacacatagaaccaccaggtaataataacacaccacctaaaatagagccaataagtgaaccttcaactaattttgcttttgattgatctaatgcaatacaataaagatatatttcaacaattgttgaaaagaatgcattgataacagcacctaatcccattgaagtttgagctgaaattgaagcaaccgcttgtccaataaaatatgccaatggaataatagatactaaacataatccaaagataacatttgaatcagcaataagtgatttccaaccaagatattcttttaaaagatagaaatctaaaattgtaaatagaactaggaaatttagattaatgaaaaaaatatttgtaccatcaactgtgtatttatagtaatggaatccaaatgatctataagtaagaataagaaatgattcattctttttattatttggattagcagcatattgacgttcataagtttcttcattttcaaaagataatgcaagtggatgccttctgatatgactggccataatagttaaaaccttactcattggaatacaaaagattgaaagccaagtgataatacttataatcattccaattggaactaaaataaaataatattgaacataaaatgcaactctaccaatagtccaagtacctctaccaaaaaatcttttcttgtaaaatgtaacatttagctcctcatcatcactatcatgtctaggctgactatgtggatcattatcattattaagaacattatcaacattattttgatcagcagcatttccaatcataggggaaggaactgatgatatattttcattagtagttgattcattattactgttcatattgtatgcagcagagaaaaataatttaccttgattttgatccctccatctagcaaattcatccattgaactaccaacattagcatcctcatcaagataattctgatctgtcttcaataaaacaattttcccaaaaggatataataaatatgaagctaaattccaataaaatttggcgtatttgattgaatcatttttcttgggatcagtgaaaatggaaaagaaatatgtaatgaatcctaaacaataacaaacaagaaataagagtaaaccaaatgtacaagtccaaataatgttgaaaatagtaactgaataatttattgcaatgttcgaaccaggagtttgatgaacatcacgttctgcttccttttgaacacttctatcttttttataaattgcaggtttccaaattctaataccgaacggatgtgtttcattaatagcaacttgtctttctttcaatgtgaaagattcattagataaaatggatgcattatcattataatctacatctgcactttcttcttgatccattgactgatcttggtacaaattatcctgtgaatcatctaacatactatccatcgctgattgttcataactattattatgcggatgcatatttggatcgacttcaattttctttaaatcatccaattgttttgtagcttgttgtaaattattaaatacatccgattcaagttctctttttctctccgttaaaggatctaccttatcattaagttgattatggccaatagcagatggattaattgatttcattctatgtcttaaagcatcattataaccttctaaatactctcttgttaaatcttcttcaatttcatcttcgttatcatcaacggagaaaacatattttactgaaggttgtttacgcagataaggtttaggtttactagaagcaataacatttgtttgcggttgttgacttaatgaagtagcagatgattgtggttgtaattgaggagattctggattcattgaaggtgaattattattaatagtattattattagctttttctcttagcagtacgtattgtctatgatgattagtatttgaagtactatgttgtcttgaaataacgtgatttttaggcaatggagacctaattgatcttgttgagtgtttcttctcaattgatggtttttttgtattaataggaagtgttggattgttatcagttgaggtattgtttatcgtactattggagtcaattgaagttgacgaaccaactaaatctgaatgcttactatttgaactatccgtaccggagttcaaattattttgaggcattgcagttaacgtataattgttatactatctataccaactggtaagtatgctttagtaaaagtaaaagagaaagatagaaagaattatgcaagatttctaaggagaattaatctttaagttgagagagtaatcaggagaagacgcacgttttttttggggttttattgtttcgtaaaagtttcaggaaccgtatatataagtttatttatagatttaaggtcaattcaatttaactcagttcatcaacgatacaggtttactataaaatataaaacgtatgtagcatatatagtatttttaaacagtatcacacatcataatattcagaaaaagaatgggaacattgcttttctgttctttgggtacttatcaccaaaagttttcttatatttagcatgtttttgtttagcccacatcatcattgtaccggtaccaacaacaaagaaaaggtaacctgaccaattattaaccattaatgcaaatacagcccaagaaagtgattcaaagaaataatttgggaatgaaacaaatttaaatgcaaaaccataaggaattttatgttctcttgaaccatcagatcttaatcttcttaataagatatgagaatataaattacaaatttcaaaaataatcattgcaccaatataccattttaattcatctaatgaacgattttcaacatgatgaataaatgaccaaaatttagtacttgtattattagtatatttatattgaggtgcataaattgagaatgcaataaataaaccattgaaaatccaataatgacctgaatttctgaaaaggtaagctaatggcattgtatcagctgagaatgaatgaataaataaagtttcatattctctctttaaataatgtaataaagtaatattaaaagcagccaattgagtaaaattcatttgtcttggactataatataaataatagaaaagtgaatgaatgatcattggacctaaatattcaataaaataaacaagtctccaaccgatttgaggaccaacatctttagcatagacattaatagttggattttttgaaaaatcaagtccattttcttctaaggtaagataattctttaaagtaactttcttaccctttgatttagaatctggtttatcattgaagacataggagaatttaattctgtttggatcagagacattatttttctttgcataggcatcaatgattgcagaaagggtggtactcggagtagtatcacaattgatcttcttgagtttagaagatgttggattgatgataacgttaaccattgttgctttaattcaatgaaaggaataaataaatgtaggtataatttccagtgaattgaagttccacctgttgtttgaaaacgtcaaaaatataaatttgattttcttaactaagcgcagattttaaattgaaactcttttaactataacctttctctttcttatataaagtaaagactttttaacccattacacagcaatgaaattagtgaactttcttatgaaactacagaatgaggtagtacaggttgaattaaagaatggtacaaccgttaagggtactatattatcagtatcaccagctatgaatataaacatgaaggacgcgacgatggtcatcccaaatagagatactacaaagcttgatcatataacaattagaggtagtcaagtacgtttagtattattacctgatgaacttgattgtgatgctattttacaggatgcagcatttagatctaaggcaaaacctgttaaaacaacagaaacaacaaaggcaccaaaacgtgttgcaagatcacaaaatagaggattttaaatttaaaacattactaattactattactatcaatacactgtatactatcataatattttcagtcttttctataaccattgtaattttaaaaatttctataaatcaataaatagatcattcatccattgcatctaattcatcctcaaattcatccattaattcactttctcgttcctctaatttcccactctcttctaatacccatctattgattgaatcttggtaatgtcattccacaaaaatcattttcttgtgtattaagtaacatatcagcaatttcatcaatataagttaatttaacaacaccattattaataattctaattcttctataatctgaatatttactctctaaaaccttataaagttgaacattatcctcccatacaagtcttgcataaaccataaataaaacagttaaatatttatatccatgattaccaataattaaccattcaaccacatcaaatggtattattttatcttgttgtaacaatcgaaataataaagtaatgaatttacatacttttgttttagcaacattgagatacgtccccactatatgtacatttaatctacattcatccaataatccataaaatcctaaccccattcctttcatataccaataatgaccatcttgaattttctctctcaatatctttcctaccaataaagctggattaactccatgaattctcaacccgcctttagcaagccccctatctactattatcctatttctctcctgttccttatccatcgtactactacctatcttgactaacattaacctaccaactatatataccaggaagatataaacctctagattcatgttacagacgatgggacgatgtataatccttcttaatagttaaaaaaagagaaataaaaatattttcttcaacgacgagaaaagctgaaatttccccgtttgatggcacaagttaataccactctgttgacctgcaactgaatctctgttttatccttttcgatttgtgtcgtttccatctgtaaactcatcaaacagtatgtattaataatattcatataatagagtatccagtttgctctttttacaactttttttttacatcaaatcaaaaggaatcagatttactaacatagcttaatccttacttacaatttaacgttaaattatttttaattttgatagatgtcaactgaagaattaacaaacgcaactcaaaatttagcattagatgaaaagaaagatgttacagcattagaaaatcaagaagaatttaatgttaaacatccacttaacttctaaatggactttatggtatacaaaaccacctgttgatagtaatgaaagttgggcagatttattaaaacctgttgttagctttaatacagttgaagaattttggggaattttccatgcaattccaaaagttaatgaattaccagttaaatcagattatcatttatttagagatgatattaaacctgaatgggaagatgaaaaaaatgcaaatggtggtaaatggttttgtcaatttaaaaataagaaagaagatttaaatgaattatggacaagaactttattaagtgttattggtgaaactattgaacaagatgatactgaagttaatggtgttgttttcaatgttagaaaaggtaatgttaaaattggtttatggacaaaatcttgtgatgaaactaaattaagagcaattggtgaaacttttaaaagagttttaaaattatctgatgaaggtaaaatagaatttatatgtcataaagattctgattcaagaagtgcaaaaccattaatggttttataatcatattaattaattaattaattaattaattaactgattgattataatcttgacataacaatttgaattctatttataataatttttgcttgaattaattttttttaaataatttagtatgctattatgatttatatacaacttatatataatataaactaccaaaaaaagtaaagaaatattttttataaatagaactgaactaaaaatgaaatttgtgaaaaaaaccccccctaattgaaaagccataaaaataaataaaatgcaaattgtaatttaataatgatgaagaggaaaatacaactaataataaacatatggcacaactctataagttttagttgtaccaatttcaccatgaattgaaccaagaccaattgtacctgaactccaagtttcaatagtatcatacattttagtaaattgttgaacataagcacttgaaatggcaactggtaaaccattttgtgtaatagtaatccaaacataggtatttaaatcaactgttgttaatttacctaaatcttcaactgttacatgagttggttcaattgttgttgttggtgttttaattggtacataatgaggacctgctgccattgcagttgtatcagttttagttttagcaattggtaatgttgttggggtattagttgtcattgcattaccagtagttgtagctaatggatcaagtgaatgagatattgatattaaagataacaataatattgataaatgggctgagaatttcattgctatgcaagtgaaggaataataacgagagtaaatgagtaagtgagtaagtgaatgaaatgtattaagttattagaggatagaggtctatatatatagatagagagatggttacagtataggaatgaaaagaagatattcaacaaccaatataaattacaggtgattaacttgctctgtaaattgcatgtactgttaattaagatttcggagttgctattaatttttcacactttaaattttctgtggggggctttaacaatcgcaattttcaattttcaattttcaattttcaatttttcattttgttagaatttaaatttttctttctcactgtgcgatggttaaagattaatttttttttttttcattttatttttcaatggattagagtccttggctggatttgacattattaaaataagcttagtatcgtatcatactattataatatcataatatcataatatcatactcagaatcatgactgatacctttatatcctctcatatattcaatgaaccagatgattatacccctgaacctccaaaaggtactcttgcaacttattcaactttaattactaacactgatttacaaattaatttaattggttcttcacctctttatggtcatattttaactcatgcttgtctatatttagctaaatatatagagaaaaatgcagaaagtttaattgtaggtaaaactgtacttgaagttggttctggtggtgccttaccttcaattttatgtggtcatattggtgctaaatatgttatttcaactgattatcctgatcctgaattaattgaaaatatagatagaaatataaaggaaaataatgtagaaaataattgttctgctcttggttatatttgggggaatccaacaaatgaaattattgacactttaaaagagaaaacttcaaatacttcaaatacttttgatattataatactaagtgatgtcatatttaatcatagtgaacatttaaaacttttgaaaacttgtaaagaattacttactccaaatactggtaaagttctagtaactttctctccacatagaccaaaattatttgataaagatatggaatttttcgaaactgcttcaaaagacccatttaattttacacctcattttcaaaatttagaacattggtcaccattatttaaagatgatactgatgaatccaccgtagaaataagaagtccgagtttatttttacactctagaataattcatatataagtcctatattataatcaaattctgtatattattcatttttcatattaactaattcacaatatggttaccttcttgtccccaaagttattaagcattgtcacatttaatacgtcattgcaaactacaattgggtagttattcttctataataccgattatatacaatagtaatttagagatctcgtcatatgtagggagttgactcaaataccagccacccaggttaacatgaaacaatttttatatcattttctcaccattacctatttaggaaacttttgcactcagccccttgctcttttaggaaaatagaaagtatttagcaatcaggtacacgcttttttagttagtattttacacgaattctctattttcccacaataagaggtatccaatttatagtgtccactaggaaacatagtacacattgcactatgtttatagcaatccaagataattaaaataatagagtttcatctagttaactaattaacttgtttttctattattaggttttagttaagattgtatttaagtagttgggtttcctaacttttttttttacatctcttctaattcaaccttacacatattttcgtttatttcaacttcgactattttaaccttttctcttaaattttaacttctctagtttctcacaattcacaaccgtgtttaccccttaacaaactaaccgactttcgtttactttttaacaacacttttcaaattatttgataataagatctattcaaatataataaaattcttattgatacctatattgaaaatataaacacaattctttcctgaattattacactcatttaaattaaaactaataacaatcaattccaactaattacattcttttaaaagatattattgccaaacataatatctatattacttatattgattgcttacattcatttacaactttattaaaaaaaaactaattataccaaataaacttattaaaaatttctcattataaaaaatgttagctattttaattattacatcaattctttcaactattgtttctgctttatcagaacataacaatgttgctctttattggggtcaaaattcagctggaactcaagaaactttagcgtcttattgtcaatccgaatctgctgatatttatattttatcatttatggacatttttggttattcttattccccacaaattaatttcgcaaatgcttgtgaaactgcatttgaaggcagctctttactccactgttcaaacatagcagctgatattaaaacatgtcaatcattgggtaaaaaagtcttattatctttaggtggtgcatctggtgcttacggttttagcgatgacgcaagtgcagaaacttttgcaactactttatggaatacttttggtgctggttcagactcttcagtcaaaagaccttttgatgattcaattgtcgatggttttgattttgatattgaaaataatattcaaactggttatgcagctttagcttcaaaattaagaagttattttgatggtgataattcaaaacaatattatctttctgctgctccacaatgtccattccctgatgcatctgtcggtgatttattagcaaatgctgatttagattttgcatttattcaattttataataattattgctcaacaattggtaataacttcaattggaaaatttgggcagactttgctaagaatgattccccaaataaaaatattcaaattttccttggtttacctgctgctccaggtgctgctggttctggttattcaacgattgataatgttaaatccattttcgaaaatgatgtttataatgttgatgattcaaactttggtggtttcgtattatgggatgcttcttggtcaaaaagtaatagagttgatggtaaatcatatggtgataacttacaagaaattttagattctgcttataattctgaagaaattactacagaaaaaactacatctacaacttctaccacatcatctacaacctcaactacatctactactcctactacatcatcaatctacatctactactcctactacatcatctacatcatcaactacaactacatcaactacatctactacatctactacgccaaccacatcaacaacatctactagcccaaccacatccacaacctcaaccactccggcaccagcaccagcaccaacgccagcaacttcaacttctacaacttctacaaaccctacaacatcaactgaaatttctgttgaaatgccaacgcaaaatgttgataccccaactgcacataccactcttgaaacgaaaacaacttcactaataatgtcatcagaaaccaacgtcaacaaagaaccaaatccaactaccaccagtaatggctcaagcaataccgattcaacagattgttcatctttatcaggtcttgcaaaagctcaatgtatgaacaacaatttcaaacaaggtaaattcttaggttcaagttcatcatgtactgaaaatgaaattgcttgtgatggtaacggtgcttttgcaatttgtaattttggaaattgggtttcaatgcaatgtgcagctggaactacttgttatgcatacaatgtcggtgatgatgtcgaagttggttgcgactacattgatagcaagtctaagttcgaaaaaagagacaatgaaagttttttcagtttacttaaaagacacgtacatcatatgcattaatctagctcaatctatttctaatatttcaaaataaatgttttgattccttactatttaatgccatttacatctattctatatcgttctaatttatacttttgcattttattttacatcttatcctatatataatgtttttatattatatcgtttaacaacttaatttcaaaaaatcatcattatctaaatcttagaaactttgttcgttgaagatgctttctctatcttattcaaattatttttaattttgtttaccttttcttttctagatctcatactttttacacctttactacgtttatttttcagaatataccgtaaaatatcacggacatcttcatcattctcatcctgatcatcatcttcatcattctcatcatcgtaatcattttcattattattattcttattattattatcataacctgtagtatagtcatcatcattattatcatcgccatcttccccaatttcattttcatcccatctgtagtcattcttaattggcgagcttttacttatcttatcatcagagaatcttactttggatggtttcagtattccgcttcctttaggttgatctttcaataatctaatcaatgatttcttttcaagatccaactctcttttttttgtttccaattctctataaagtgattcaaacttctcttgacttttctgattttctagtttcatgtcttcaaatttagattcaaatttaatattattagtctcttgcttcctccgtaagttaaccagctcatttttaatgcttcctaactcctccaataatttgctattagaggtcaagttaacttcatctaaaactgtttgtattctattatccaaattttctatttgtttatcaattgttttagattgtcctatataatcgagagaatcatcagttgtgtttatttttgttttgttatctttcttttccaaaattgttttattcaattcatttaagtatcgtttactctcttcaagttgtagatctaactctttctttttcaattctttttgtaaaatatcatcattatatgttcgaatgttgctaggtattataggtgaggatctacttttatatgttgcgtttgattcaccatcattttcattatataatattgatctaaatatttttgatccaaaattactcaatgaattcaataagctgttgttttgctcatgctgatatttactaaaagtcgtaggtgctttagtggatgaataagacccaaaagagtccaatggatttcttcttaatgactctttagttatattttttattgtgtcatcatcatataatgctgcacgagttggtatgtggcctattctatcaattggtttttcgcctaacaattcataagttttcaaactagcaggatctctattagaaaacatatttgatgatttaagatactcagattgacgatttggcagttcagttgatttaaaactatatcttgaacttgttgatctcaaatcatttttacctttatttgaagtttccctttttagaaattccaatgcttcgtttttccttctttccctttccacctggcttaatgataatctatctgatgataaattattgcttttaaaacgaacacgactggaagatgttccaagtttcttggtgattgatgatggtctcgtggaagacaattttctgattctatctttacctaaatcatatgatgtagtggtagacctacgatttgaaggtggttcatcaccaaaatcaataggtatacgcatttttggaatataagacatttcaatcagttatattccttgtatgataataaaatctgaagataatgtatacactattggattactaaaggaatagatttcattttaataaattggtttgttgatgttttcaaatctcaaagctttcacacgcgtcctataaaattttagagttaacgcgaatacatgttaacattaccagtcaaattttcagttctttaagatggttgcagtgttttaagaagttatttattcaagtgataatattgcttaaaaagatatatcattcatatattgataccatggatagctcttttattgatacaaccggtattgatgaaccaattttaccaatagaattaaaagcaactgttttcagaccatttgcttatcgtgttctgtcaaagaaatacggactaaatgttcaaacatcagctcttgaacatctgtcctcatatgtagggagacgtttcgggaccaaatggaaaagagatcctaaaactttagcatttttagatgctttaggaaaattatggaaggaacaagaacgtggaatttttgttgatggtgatggtgttgatcaagttattaaagagatagtttcaaatgaaaagggaatgaaacagagaataataaatgcacaaaagataagagaagcacaaaaaaataatatgcagctatctcagttcaataacaatgatattctaacatcagatataggtgatgttgatgaaataaatgctaatagtaccattggtcaattaccagatctttcaatggatggaaatactactacatttgatacatcgatattgtttgatacacacgcaatgaatggtatagatattgatacatctgatcttattgattggaagtcatattttaaagttcttgatccaaatcattatacatgtttccaatatgatatagaccgtaaacaattcaactacgctcaaccagagaaaaacccaaagacaataaagctaccaaaagctgatgccaatgccaaattttaccgttcaagaatagaactgttacgagatagaatttatagaaacggtatattttccagactcaaatataactctacatcggaatcaaaagtccagaatcaaatgcatcaacctaaacacattactgctgttaaaaatttgcttggtagaaatgaacaaagattcattctatttggtttggttacacttaactcatttggtgtttggcaattacaagacgattcagataaaattgagctggttttaaaacaatgtatttttgcaaaagatacattttttgtttctggtaattacttacttgttgatggattttattcttcagctggtaagtttcacgttttatcaatggaacaccctcctgctgaagatcgtgaaagtacaatagatgcatttggcgatatcaatttgaactgggattattccaaaaatggaaaaactgatccttcaatgaaaagactaacacataatgaacttaaaaaacatacagatcataaaattgtggttttgggaggtaatttgtttttagatgatatagatattttgaacaaattgaaaaaagtactgcaagaaattgaaacagaattgaagttcaacctagaatctagaactgagaaggccgataatgtacatgataaaccaatcgcaattgttttcaatggtccttttgtatctaacgcattaactgttactgaaggaacttcatcaagattagttacgtcatcgggatcatataaagctggttttgataatcttgcaaatatactacaaaattataaaattatttgtgataactgtaaattgatatttgtaccaggagatgaggatccttggttgtcaatgattactaaaaacgctaattcaatttggcctaaaatgaaaataccatcaatttttggattaagattaacccgtttagtaaaggatatcgaatgggcatcgaatccatgtcgtttgagttatttacttcaagatatcgttttgatgagagatgatattggtgaatccttcagaagacatgattttacatacttgtgtgaattgagtgatgatgaaattgagaatgcacacagacgtataaaagataataacgctgacggtaaagatgcgacaatggctttcggtaatgaaccaatgagtagtcaactttcatttttaaacgggggagatttagaaatcgataaattaactataaaagaagtcacagatagtgaaaagtttaataaaatagttaaaactttactcaatcaaggtttcttatcaccatttcatacaaatattagaaccattctaccaaattattggctgcagatgaatttgaatgccgcttcctaattgtattttaatgtcggatactacatctcctacattatcaacaatgtacaaaggttgtctagttgctaacgttggaagttttgcaaataagggtcatgtgagttatttagagtattatccaagcagtcaaactgcaaatactaaaacagtatactgaatttaaaaaaaatcgtaggaattaataattcggtttaatcactaaattctatgtaaatcgatatggatattgtttaatagtatcagtaacagaaacgggtaagcaataaattgtatttataggggtcaaatcaccataacccaataaactcaaacctgcgattccaaaaaaagtatgatagacatcaacttccttatctggacgatcacttataccacctttactatcatcttgacacgagaggatgaatccttgtaattttgcaccgtctatataatgcaattttcctagcattgataatgatgataaaacccaccaactataacagacatcaggcaacttttccggtcttccattcaatccaccgccttcgatttgtctatctgataaccaccactccaacagttcacgaatttggtagtttatccaggttatttgtgattgctaaaacgcctaaacatgtgaatgcttgtgcggcatgagattcagcacctggaaccattccaaagcaaccgtcaaaattttgacactgaagaatccattctacagctggattcacaatttctggtgttaatgcttctaaaagtgataaacattgaattgcattatacacaaaccttgtatcaacttcaccaaatcgatcaccttggaaggaaccatcttctaattgcatacttttgacaaagtttatcacacgatccttttgttcatctgtcaattcatcaattgcatcatacattttaagtacctgtatagctgatagtgtagataacatatgtgcatcatgttttggagctgcaccaaatccaccatttgattcgtcaatacatgaaatgacaaattgaataacttcagatctttcaaattccttttgatgtttcaagagaaacaaggtaccaagaccccaatataacgcattcatctttaaatgatctgccatgaaatgtatcaaataggctggatgcctaaacaaatctttcacatacatgacatgtttttcagctaatagggattcattcatatttcttacaatttcaaggacttattgttatacaatgtgtattatatatatatatatatatatatatatatatgtaaataactagtatatcgaatgtataacttggttaaaccaacccagtgtccttcagttagaaacttttgttactcgaaataaaaatatatatactttcatgttcgtcttcttcaatttcctttttatctttttaaaatagattataagagtatggacgtcggtactaaaacggtaaccaagataactttatatgcggagcccagtgaagtgtctaaacttttctttgaagtgaagaatggatattatgatcctgttatcttaaaatcggaagaacaatttctaacatggtggagttggatgcaaacaagaacagatagttgtggtttatatgatggattcatggaacttacaaaggcgattaatcaaaatccacctcaaaaaatgataggcatggatgatgaagaaatggtgattaagacattaattatagattctgtaccagaagttttgtatcttaattcggagagtgattctgcccaagagtacatacacagctgtctcaaaataggaaacatgaaaccaggagtacaaacattaaaaaacttgatattggaattcaatctggataagaacaagtctaagatagaaatcatgcatgagtggaactcagttgaaactcaaacatcaatttcaaaacgttacaattaatgaaactgatattcttaaccgtttcattgattatgttgcatcatggaaatcagaaatcgagttaaagaatcagttgactgagattcacaaatgtgattcttctaaggtttggaaagccatatgtgtattttatgaatggaagataaggatggcaaaatacgagcctgattttgaacactcttccactactgttattaattcaaacgatgttattaatttagataagaaatgctacttatgcaaatcatcaggtcatcttaaaattaactgtccaatgaaagattgttgttttatgtgtggtgatccaaatcatttcattattgcatgcccagttaatcgaaaaagattgctaaataaatatgccattaaaaacagaacacattgcagcccacatgatatgtacatggatagattgaattatggctgttataacaataactaataatacatattatagaggtaattttaggggtagagacaacagaggaggttttaacaataattttagaggtatatttcatggaaatgttagaaaaaacggttgttttaatagaggcagaagttacgccaattttggtagaagaggtggttactaatagaagtttatcaaaaaataggggtggcaggctcaactagctacacatggcaaatttgctacaatagaagacatatgagaaactattattgtcgaaatgcgtgttttaagtttaaaaaatactatcaaactcagagaatcagataatatcaatatcataataagattttttagatggtttcaaagtttaccatgactggtcgaatcgaatcactattgaagattgaagagcttttgttaatattgatagtgttatgggaactctcagaaaacatttgacttttctttttctttgttttattcttacaactgatatacccagggttaatgaaattttctataaacatgataaataagtttactggtttaacttgttgtgtgtatttttatatataatttactgcaaacttattatatccagtttgtgtattaactaatcgaggttaaccttattcactgtcaaataaaaactaagttcaagacccattttacgaaaaaacttttggtttttttcttgggagtagtttcatttatcttcaaacagacctatactcaagatatactttatatccatctaaaagaaatgccagccaatcaagaaggcactagtctttcaccagacacacaggtaaatgaagttgttcgaaagtgaagaagttaggcatgctattgaaaacaaattcaagtttactgacaataaagaagatttagatatatcagaaaacgaatcaaaggtgatcgatattaaagaaaatgtaaataatccgataggaagtgagttaacactttatactggaaatgaagcggatgttttagaaggtgttaatatagaatcgactattgacgacatgtctcatagtattaaaagtttagcaaatgagcaagctagaatttccgctgacactctccatgaaagcgttgaaaccattaaaaaaatatgtgaagcaggccttaaagatgatgaagaatcattattttataagtctagtttaaatgtaaaaaaatgggttcaagatatacgtgaaatgctttcctcgtatgttgattaaatgctttttcaagagacggtcaatcaattatatcaaataacagatatatcagaattttttgattataatggtatccaatattcaaaattgaatatagttactaaccatggtcaagttactgatactgaaacaattaagttacttttttctgatacaatttctataatgtcttttcacctttggaatttgcaattttggaagagtagtgaaagatgatattaactattcttctggacatgcaactacaatgagttctgcattaaatgtcccaatttctaatttgaagtttcattgtggttttattgaaaactttatccttttgaatgcacaaatggcgggatttcgccatatctctacactcaatgccactgaatattacttttctggtgaattccttgatagaagatttaaaaaatcacatactaccacatttaaagatgcacttgattcattttattactactcgcaaaacatgcgttgttatcttaaagaatatgccgctcactatttatttgttgaatggataacaaagaaacttgaccgtaattctgcaaaaaaattaagagatgctttaaatatcggaatagataaatgtatcacagataggaaagattttgatgtaaagtatctatatgatgctttagaagctttaaatgctgaaggtataaaacgtccagccaagggtgaaaagaaaaggaaaacgcaagtggttgtagaaggtgctgaaaaagaggttgaggtaccaccggcggtactggtaccagagtttccaactagtaaacgatcaaagagaccaacagctaaacaagttgctatagaaatggcaattaataaagctagacaacctcaagcacaattacaagcacagaatacaatacagccacaagcacaacgtatgacaccaccacattcgcaacatatgtctccacctcaagcacaacgtatgccaccacctcaagttcaacgtatgccaccacctcaaacgcaacttgcagtgaatcagacagttctgcaattttatgaaactgaccaatattcaaactacgcagttggatcatcatcttccgaacaatatatgcctcaagaagaaattcattcaaggaaaagagaaagattgcctttaacacaaagagaaggtcgccctttcaaaattgtaaaggcctcctataatccatcaaaatgggatagaagaggaaaagagtttacacgtcagattccaaagggttatatttgtaagaaaggatgtatatggtgtatgaaatgtggtgcttcacatgctccacgtcatcatgtttttgaattaaatgggaatattaattgggatgctgcagatatttatggaccagatttagatattactgaaaaactacataaaaaacaacagtcccgtagacctcctgttacatttgaatcatatccacactcaccagctacatcagtgaatcaacaaccattaccacctcctcgtggcccaccacctccaccgccgccatcacctccaacagcgccataatgaccgaccgtatagatatactttttataatttagttgtaagtttattttggcccatatccactaaatttttctgtgaaattgaacgtcttctttcaatcattataaattgcatctgttgttgtaaattcaaaatcattgttctttgattgttcaattgttctcttaaacttgagttatcctcaataagtgcacctgtaacagatttattaaattccaattcttctattaatgtctttactttattataatttattttaccatcgttcaaataatttggacttctcactgaagaatcattgacatcattattaataatactttgaaaggatacattcgtcaaacctgatgatatttcttcaatatcttgcgaataccctaagttcttaactttcccatgaactatggaatcaagtatagtactcatttgtaatttcaaattttcattctcatctgtaagttcatttacttttattttctaatttttccaaataaccacttattttgataaatgaacaatcaactaaatgaatactttcaagtaattcacgttggcctttccaattacaaccatattttgttccaggacaattaatgtatattttttgacatgttgattgatgtttttcaaagtacattacgggaaatgatagatggcatccagtacatttaatcatatttttcaaacactcttttttcaaatgattatccagatccattatccttaccaaggaatcacaatccaaacatttgatttctgaatgtgggcatgtttcaattatttcagattttaaatcaatattgttgttacctttaaattcatgttcacttaatatttcatcatctgagaaatcaccaccataagcattagaatcagaatccacaatatcaactccgccatgattgtcatcatcatcatcatttcgtaccttctcactataaacagctttaacgatttcaaatccatttgtatatgatttctttaataaattattatcaactagtaattccctttcacataattcaccacatttacatttaattctcgtataatcacaattttcaattaaatgatttttaacactccaacgttcaccagtccatgaacatcctcgagatttatttaaacaacaaacaattaaatcatcagttatattagaaataatgattggagctggataaatatcagaatctgttgattgttcatcattatttatgtttatatcatcaaattgtataaattcatcattaattatttgattccttatcagagatgatgattttactgaaacacgatcaagtggacatttttcacctaaaacacttttaaaactttcaaatatgcattctttacaaaatgtatgaccacaaactgtactccaaggttcaataaatggtaatttacatattggacatgttatatgatcaagtgatcttgttgaggataggtattttaaagatcgtaaatccagttgaatttttagatctttgattgatttcatcattaaaagggttatagttgaggtcaaacccattatcatcggaatttgtataggtttccatttgtacgtgataagatattatagacaatgcttatcaacaataagaagaaattatatcaaagaatcttgtatactttatctcgatggatgagattttatgttgcgaaatttatcttaaatactcaaaagtaaaatcggtttttatcattgaaaaggatattaaaattataaaagttagtatacaatagaatataattagaagtgaatgatatgatatgctatataatatgataagatatgacgtgatatactaagaaaaaaagcgtaaaataataggtatataataataaattgaatcaatcaatttaaaattaaacacttgtagtactttcagtatctggtgaaataaatgcacgaacaccattttttctatcctttgcaagtttcattgattttttaacatggaaaccaccagttaaaatatcttgaacttcctctaattctagattagataattcaggataacataaaacaactataatgaatgaaataaaaccaaatcctgcaaataatgagaacgtaccagttggtgtaatattttttaacattgtcaagaaagttgatgaaataattaaagagccagcccaatttgaacctgttgcaaatgagataccaacacctctaactttttgagggaataattcactttgttgccaaggaacattaccaataccaattgcataagatgcaacgaatagaatcattgcaacaataatgacaaccccccatgaatgaatattaccatgaacaactgcatcattttcattaaatgtaattctaataaaatggaaagcaattgcatttagaactaagaaagccacaacacatgttaatgaaattaagagcatttttctacgaccaactctatcaataatgaagaaagctacaattgtaaagataaaattagtaccagcaacaattaatgagacagcagttgaattatcgaaaccaattgcttcaaagatagttgaagagaaatacatcaatgagttaaaacctgttaattgttgaattgcttgtaatgcacaacttaaaaataaagcacggaaatttgaaggtactctatgtaattcaactactgttaaccaccatttcttgaaaggatttttacaatcagagaaaccattttgttcctcttcttgtaaatctaatattttaattctaatatgttcgattggtgtatttgggtgagttttagataaaactttttcagcttcatctaatctattatgcatgattaaaaatcttaggggtatcaggtaagaaataaaatgagacaaattgaataactggaggaataattgataaaccaactaagattctccaaccattattaacatgagataaacctgcaccaataggcataagcaattaattgaccaccagtaatacctaaacaatttagaataactaatctacctctaaattttgaaggagctaattcactaatataaagaggagcaactaatgaaccaatacctacaccaaaacccataacaaaacgaccaacaatcattgtccaagcattttgagctgcacattgaataattgcaccaacaataaacataatatttgagaataataatagaggtcttctacctgagaagtcgacaaaaataccggataataaagcgaatatgaaagcacctaaagaagttgcagcagtaatgaattgttcttgaccataagataatggatgaccaaaatcttcaccaatagcaactaaggcagaagagatataaccagtatcataaccaaacatgaatcctgaaattgatgctaaaaaggttaaaaagataatcaaaaaggaaggtttctcaccagagaatgaggaaggagaggttatagttttcaaagcaagttcatttgaaacgtttgaatcattagaatcattggaaatcatatcaaaatttgaattaattgatatatgttcctcgttgtctttatttgagaaatgaatgtcgaaattttgtgaatctgaggtatttttttcttttccttgagagaagaatccagacattatctaaaaaagagtgaatactagtgataagaatatgaatatactaaagaaatattgtcgattgaatgtaagcagaagccttaatataaaataataagtatgaaatcagcagttggcgaattggccgagaatgttagtaaaaaatccaggaaagaaaaaaaactgggaaatcgctctccttttatacacggccaacaaacccgggattttcaccgcgctttctagaaaatactttaacctcttactccacttcgcggaattcccgtacgtccttactgtgtgtcggtggaaacaccgagtttgttagcgtaatgggggaggtgagtttttataagcttaggttactaatttcgcagatcatcaaatatcaacattgaaaaacttcaaaattcagttttctattgttgatagttgctacaatttattttgatattggtatatgtattgatattgatatatattgatatttaattttatataatagtatatatcatctctaatagtatggtcaacttcgtgaagaaattgactcttcctctctatgagagtaagtataaggagaagaaagttggtttcaaccctaatcaatattccctctttgctattactagatccccatcaccttatgttatcattctaattctgtttgctattttatccactggttggatattaaattgtttctttataggtaattcaaataattattataattataataatagtgaattatcatggaatgagtgtattaaaccaggttcagatacttatatgaaatttttcactcgtgttttcaatatttatgaatttcatcatattgatcaaaattcaattgatttattaatacgaagttcaaatagtaataataataatgataaaaatattaatattaatataaatatcaatgaaaatatcaaaaaacttaatagatattccaaaattgaattaaatagtttaattcaagtaaatccaaattttatagaggaagcaaaatttaaacatgcttcaattttgaaaagattacctcaattctcaattaacttatctcgtggtaatggttatgttatggttggtaataaaaaatcttattggaatatttatcttacaattaaattattacgtcaattaggttcaaattatccatttgaaatcattataacatcaattaatgaatttgatgattatttttgttcaaatttaattaaaaattataatgctaaatgtattatgttaaatgaaagattaccgatcaatattttatcagatatgataacatctgattcaatggaaaactcttgcaatcttatcttcaaatttccaaaatgtaatttatttaaattcaaatacttaccccgttaaatcattagatgaattatttgattcacctatatttagaaaacatggattagtattatggtctgatacaaatagaagagaaacagttccatctttttatgaaattcaaaatattaaaataggtaaaccaattagatatttaaatgatatttacacatcatcaaaattatttaaaacaacaaataatcaaaattataatgataattatgtttcatatcatgatagagcaggtacaattcaagaatggacaattaatgatgattttatgttgattgataaatcaatttatttacattcattattattatcattatggtatcaaaatgaaggtattgataaactttacccattaatttcaccaagtaatcaaaatcttgcaggtaaggaaacaattgcagctgctgcaacttatatgaaaaaaacatattatcaagtaagtaggaaacctacagtatccgatattaatggattatctaaaataaaattatttattaactgggacccaataaatgattttataaatctgaataaaatttcttcattaattaacactgattatcaaagattaactgaacatttcaaatataattataaaaaatatttcattgatacttttgaaacaggtgaggttcaatccaccccactattctataatttttcaccaattgatcaaataagtaatccaattgatttatataatcaattagatgagccaggataatatcaacatgagatttttaccaattccaccaaataattttgatattgaaaaatatttagtacaatatacccatgaaatctattgtaaatggtccaatccatggactaaacaacttgacccacactcattatctacactatgtaacatttatctaaagaaccatatgaaggttctcttgtaacttaataatattattatataactgtaataggaaattaatcaattttcccaaaagggaaagagcgccaaaattgataacttttatcaaaaatggaaatttagtacagactttccatttcctcaaattttcatgctgccatcaggtttcaggtttgattggttgtattattatcgatttggattacatctgagcccttttcaattatatctattattagacttttaaaagacttcccattatcaacaatacaaatatgaatgtcgatacttcaaatgcattacctaaagcttatggaagttatcctgattatataagattatctgaagaaattgaacaatttttgaaagaatttaaatctgattcatcatatgatttagatgatcaagttgcagctgatttttatgatagaaatgaagaagatatagaattattaagagaagaaaatgatattaatgcattaccgaaatatcaattattaatgcaaaaaattgcaaatagagaattagagaatattacaattgaattagatgatataattagatttgaaagtttacaaaatacttcatatcaaaatggtaaatcattagcaactgaaattagtaaaaatgctaatcattttcttgaattattttcaagaattattgatgaaaatttacctcaaccaactaaaccaattaatgataaagattcagttttagatgttatcattcatcaaagaagattacgtactaaaactttagaagaggaaagagagagagaaattgcaagatctaatttagatccttcaagaacgggaatagacgattccaataataacaataacagtaataatgataataataataacgatccaacaaatgaattaaacacagcacatgaattatttcctcctcaattattaagacgttataatctatattttaaacctgttacaggtgcaacgggtaaagtgaacaaacctttaaatattagaaatgttaaaggtaatcatattggtaaattaattacaattcgtggtattgttacaagagtttctgatgttaaaccatcaattgaagttcaagcatatacatgtgatgcatgtggttatgaaattttccaagaaattaaatcaaaaactttttcaccaatgattgattgtgaatctgaaatttgtaaggccaatcgtaaacctggtcgtttatttccaagtacaagagcttcaaaatttactccttatcaagatgttaaaattcaagaattagcaagtgatgtaccaccaggtaatatacctagaatgttaagtattcatgttaaaggtggattagttagatcaatgtcaccaggtgatttagttgatgtttcaggtatatttttacctcaaccttatacaggtttccaagctttaaaggcaggtttattaactgaaacttatttagaggcacaaaatgttaaacaacataaacgtaaatatgaaaacttaggtttaacagatgaagttaagcgaaaattgaaaatttaagaaaccaagataatttttatgatattttagctagttcaattgcacctgaaattttcggtcatttagatatcaaaaaagctttattattattattagttggaggtgttacaaaggaaattggtgatggtatgagaattagaggtgatataaatattttattaatgggtgatcccggtgttgctaaatctcaattattaaaatcaatttcaaaaattgcaccaagagcaatttatacaactggtaaaggttcatcgggtgttggtttaacagctgcagttatgagagatccaattactgatgaattaattttagaaggtggtgcattaggttttagttgataatggaatttgttgtattgatgaatttgataaaatggatgaaaatgatagaactgcaattcatgaagttatggaacaacaaacaatttcaatttcaaaagcaggtattacaacaacattaaatgcaagaacatcaattttagcagctgcaaatccattatttggacgttataatactaaaatttcaccaaatgaaaatattaatttaccagctgcattattatcaagatttgatattttatttttaattttagataaaccagatttagagaatgatattaaattagctgaacatgttgcatttgttcatatgttcaataaacatccaactaatgaatttgagacaattgatgaacaaacaatgagacaatatatttcaattgcaagacaatataaacctgttataacaaaggaagttaatgattatgttgtttcaatttatattaaattaagacaagatagtaaaaaaaatgaaacttcaaagaaatttttttcacatacatcaccaagaactttattaggtattttaagaatgtcacaagcattagctagaattagattttcaaatattgttgaaattaatgatattgatgaagctttaagattaattaatattgctaaaaattcattatatgatgataataatgaaattgaggaaacttcacaagagaaaattttcacaattattaaagaatttatttcaaatgaaatgcaatcaacaaagagtaaaatagtttcaatgaagagattacatgaaatttgtataatgaaaaattttactgaaagtgaaattaatgaatgtattgaaaaatatcaattacttaatatttggcaagttattgataatggtgaaaatttaacattaattgatgttggaggaatagatgaagatgatgaactttttgacaccaatataagttttgatgataatgatgatgatgaagaggataagaggaatacctcacaacaagatgttgatatgagttgaaaatattagatgaatgtacttttataactgtgttttatttgtattttagaatagttttataaaaaaaaaagggttatataacttatttaattaagacctaaatcttttttaaccattgatctacaaattggatgataaatcattgcatatttattaaaagtttcaatagctaattgatgatcaacttcatttaacattgaatatgaaggtctaacaaatttcattctaccaacagtacctaaccaatcagctaatttaataaatgaaggtttatgattagcagttaataataatctaaaccatctaaatataacttcagcattttgagattctggatattttgaataaatttttgacattaaatgaattgcatctatacctttggtagatttccaagtaaatccattaataccttcaaatgatactaatttatctaagaaaacaccattttgatttgcaccaaaatctttaatatcatcagaattgaaaaatttagataaatcatcttgatcattattatttattttttcaaaccatttatttgctaaattataacattgatcaactaatgaagtatcaaattttggcattggtggtaaaccaggttgatataaccaaactttccaatcaattgaatctaataaatcttttctatctgaataaaattcatataaagtatctaagaattcataagaatctaaagatttatatttatatttattaaaataatgtttaataaaaggatcaaattcttttgtaccacctaaaatttgttcaatatgaaataaaagattaaaacctttttcataaggaacagttgagaaactatcatcaggatcagttttatcctttaaattttgaattaaagttgagaatctttcagcagatttacccattgaaataattgaattatttaaatcattccaaccaataattgcactaaaatgtctaaaagaatcaccatgaattttaccttgaattcttctctctaaataaacagtccaaccttcatttaaccaaaaatgttcaaatgaacaattagtaactaaattacctgaccaagaatgagctaattcatgagctataacatcaatattttctctatcaccagagattaaagttggagttgcaaaagtacaatttggatgttccataccaccaaaaggcattgaatttggtaaaattaagacatcataatcttgccattcataagggaaaactatattttcagcagttttaataaaagattcagtatcattttcaaattcatatttacatttattaataaagaaaggttcagaataaacttttgatcttggaccaatttttgcatcaactatatcacctgaagcaattgaaactaaatatgaaggaattggaacaggttgttcaaaatgataaattgaattatctttaatatcttttaataaacctgaagttaaagtatttaattttgaattaaaataataagtaaatttagatttaattgaaggagtatcaaaacaagggaagaaagatctagcatgaattggttcacattgagagaaaagataaggattttttttaccatcagtttgttcaggatctaaccattgtaaagcagtacatttatcagttgtttgatagaaaatttctaatttaaattcatcattaagattagatttataattaatttctaatgatgaacctaaaggttcaattctattattaattttataatttgaattatcgatctcggaatcattaattaaaattttattaattttcaaatatgatgtatcaagtaaaattttatcagaattattattaattgattttaaatttaaaatgattgaaccttttaaaattttttcatcaaataagacatttaaatttaaagttgtatgattaacattaaaattataataatttgataaagttgaaggatctaattcaggtgaagattttggtaaataagaattaacaatatctcttaattttggagataaatttgggtatcttgaggtagatgatgacataattcttttacttatagatgtaatgaaactatttgaaatgatattattataatttttaaaaggatagatgtatttaaacatcaaaagaaagaatttttattaatcaatcctatactatatcaattgtataaatagagtttatttatcttttcaaaaaaaaagacatgaaaatggttaaagcttagtaataaattgtgtatgttgatagcaaaatttacataatttacaaataattacattgtcttattattatcattgacatttttaagggccatgtagataaacggcttttcaaaaaaattaaatttattatgtaatcggtatcttttttctaaaattttgaaaatattggaagggttttagtcacgtttgtgtttagagggttactgtcacgtgatttgtgatttctcaatttttaatttttaatttttcacttttaattttccacttttcaaatttcccagtgcgtctctctcattttttttttccaatttcttatcctcctggagagaataactttaaaattcttttcaccctcacaccagtgggaatcccccattctcaaaaaatttcatcttactcaatcatattcatttctgaattttcatattatattacttattactgatatattttgtattataattattactgttttaatttaatttaattcatttttcaagaacttagttaatagtcaagatgcaaatttttgttaagaccttaactggtaagaccattaccttagaagttgaatcttcagatactattgataatgttaaacaaaaaattcaagataaagaaggtatcccacctgatcaacaaagattaatctttgcaggtaaacaattagaagatggtagaactttatctgattataacattcaaaaagaatcaactttacatttagtcttaagattaagaggtggtattattgaaccttcattaaaggctttagcttcaaaatataattgtgaaaaatcaatttgtagaaaatgttatgcaagattacctccaagagctactaactgtagaaagagaaaatgtggtcattcaaatcaattaagaccaaagaagaaacttaaatagattaattatttggttcttaattattattatatgtatgtattttttctatatttataatataatataatatgttgaaataactttaactttacatttacatttaaatttacatttaatttattaattttatataataatttgtttgaataaattaaaatcttgatataaacaaaaaactagtgtcgtacttagttacacaccttttttttcattaaaccatcccccacacacaaaatgaaattaatacgttcatttattcaacatcgtaatttaataacgaaatcaactataaatccaaaatctattaatttatcaatacctgaaaatgttaattcattaattttattaacaactccaaaacaattaaatcctttactaaaatatttatcccaaaataatgaaactttcttaaattcttcaaaattagaaaatttaatagttgcaagtactgatacaatttgtcattcaagaaatgcaataagtgaattatggattgaaaataatgaaattattaatattaaaaatattgaaaaaactaaaaaaattgaaaataaatcaaaattacatagacaattagaacctttaagtgttgatccaattagaatgtcaaaaaattggaaagatattaaatatgatggtaatattaatataaatttcattaatttaaataaaaatattaaggcaaatttagcttgtacattatttgaaaataataattataatacatgttttataataaagaaaagtcttgataatgaaataaatggacaaaatttatcaaatattgaaattgaaattaattctaataatcaaataagtaatataaattatagtaataaattaattgaaattccattagttgaagatgaagatttaagagatgaagaatatcaaataacatcatttgaaagtaatatgattaaatcaatcaatgatcaaagtgcatcaggttatttaattgataattcaattgttacatcatcaaagaaggaattatttttcaaattatataataaagataaggaaattgaaaaatttaatgaagaattttattcattagttgcaggtggattaggttggggtgaaaagcaagcatttttagttgttgatccaattgttggtaatgttggtaatagatttgttaaattatattataataaaattgaattaaaaatgccaaaaattgaaagtaaagataagactacaattcaattagaagtttcagaattagaacaagaatttaatgaagttgagggaaaagttgaaaatgaagatacaatcattatcaacaatgtattctctattggtagtgagaacggtataatactaaatggtgttaatcacagagctcatggtgaaaacattgaaattgaaatttaaatatatcctcttaaggtaaaaatagcaacatgaaatttccttctattttgtagacatcgcgataagtttaccactcaatctctggtcttgtcttgtttatatacatcctttttttcttgttttgtttttatagatcaatttttttatatagatatattaatatatagatatccacataatgagtaatttacttgcaaccattcaaaatgtcaatgttggtaatattgttgaacaattaaatgttgaaaatattaaggaatcatttcaatcattacaaagtaaattttcaaatattaaatcaccacaagaatttttcgatgtacgtcattttagtaaaccaagtaattttactgaattacaacaaagggttagttataatttaaattattttcaaacaaattatattttaattattttaatgttatcaatttatgcattaattactaatatgttattattatttgttattttattaacaagtggtggattaattttaattaataaattaaagggagaaaatttaacaattttaaattcaactattacaacatcacaattatatacaacattaatgataattgcaattccattaggatttttagcatcaccaatttcaacaatgatgtggttaattggttcatcaactgtttgtgttttctcacatgcaagttttatggaaaaaccaattgaaactgtatttgaagaacaagtataaggaatataaattattactagattgtataagatataattacatactacaatatataaaattattgttaaatttaaaaatcagccgaaagaagacccaaaaagtatcactcataaattattcagatactatctagcttgacatgcggtggaaaaaatttcatcatattataaattataacaataattttactattaatacagtaaacttacaatatattaattgttgttaaaagaaagaaggtacgtaatgatcttattatagtaaaatgggaggaataccaactctttttatagtgcgcatagtaaattttctcaaagggttagttaatatgagggtttgtcttagtatagttatatcaactatatgggttatactacttcgtatagtatactatctatactattttatgattaaaaaagtactaaatttctattagattaagatatgatatattatattatattatataatagacaaatatattaggattttatatataaagtagtaatgaaaacataaattgaatttcctttaaacaacaagattataaacctaacttagttctcttccagtgtcttctctttgcattatatctaattttgttattagttcttaatctaatccattgaggtaatggtctgttttggttttgtgctttacctaacttttgtttgaccttgaaggttttttgagactataatagataacagataataaataatgatatggatatgttagtattctgagcgtaatgtgggttttaattataatagtatattaatacatacaggcattgttgttcgtagataaagaagataactaaatgtagtaccaatattgtaaaactattataagagatgaaaaaaaaattctaagctatactattactattactatactatactatacagtattcgcgctgtgcttccgaaaagagtaatgttccaccctcgcacaccttactattctctctctctgttttttacttactgtgttaggtaatacatagtaaagaattttattattattattattattattattatttcactactgaaaatttcacctgaattaatttctttgtgaaatctttaattgttttaccttttgtacatcatcagtaactaaaacaaaatgactagaacttcagtcctcgcagatgctcttaatgcaattaacaatgcagaaaaatcaggtaagagacaagtccttattagaccatcatcaaaggttattattaaatttttaaccgttatgcaaaaacatggttatattggtgaatttgaatatattgatgatcatagatcaggtaaaattgttattcaattaaatggtagattaaataaatgtggtgttattcaaccaagatttaatgttaaaatttctgatattgataactggactaataatttattaccagcaagacaatttggttacgttattatgactacctctgctggtattatggatcatgaagaagcaaagagaaagcacgtctctggtaaaatcttaggtttcgtttactaattgtgtttgtatatatatctttaaatgttatatactaattctaatactataatataataaaataatagattttaatcattatcttgtatgtattctatgtgttgtctaatgtagtataccatctattatactatctactatactatctactataccatactatctctactatctatcactgcattatacgatcacgtgacatgtgcttacctaatcccatttgtgactgctaaatccccgataatacccaaacaacatactgatattacgtaatccccccttcacaccgcacacaatctcttcaaaagaaaagaagagaagaaaaaaataaaaaataattgcgagaaaaatcctgggaaaaaaagtaagagaattttttttactatgaggatatcctctctctctattatgagatagtgaaattttccatttacttagtattattgatgtttaattacatgatatttcaattttgaaagtatttttcactttagagattgaatttcaatattttaatatatcatttactttgattagttcctcataaccaacaatgtctactgaaaacgttactcttggtccacaatcacaaggcactgctgaagttttcggtgttgctcacatctatgcttcaacaaatgatactttcgttcatgttactgatttatcaggtaaagaaactattgcaagagcaactggtggtatgaaagttaaagctgatagagatgaatcttctccttatgctggtatgttagctgcacaagatgttgctgctaaatgtaaagaagttggtattactgctgttcatattaaattaagagcaatgggtggtactagatctaaaactccaggtccaggtggtcaatctgctttaagagctttagcaagatcaggtttaaaaattggtagaattgaagatgttactccaattccatctgattctactagaaagaagggtggtagaagaggtagaagattatgatttatttattatatcttatatcatatatcatatcttatatcatatattaaatcatattacaatgttatattaaaatcaatatctccaattactacatatctttttaataaacatctttttatagtattataaaaaaaatctaaaatataatttgaaaaaattaatttaatgtcctaataactaacctaacctaaaattctttaaaatataaccagtatccttatacaatcactccttcttagatgcatgacaatgatatcatcaatacccaacttatcatcatcatctatattcataatatccttactacttagaatagcattctttctattcggtttatatcaagatgcttatatgccattaccttatacagatattgattatttcgtgtttactgatgctgctaaattcgtagctaatggtagttcaccttatttacgtgaaacttatagatatacaccattattatcatggatattattaccaactacatatgattcaactttatggttttcatttggtaaattcatattcattatttgtgatttaataacaggttcattattaattatttcattgccaattaattataaaattttatcaactatttggttattaaatccaatggttataactatttcaacaagaggttcatctgaaagtttattaacttgttttatattattaagtattttcacacttataaaatcttcaaataattcaaaatttggtacttttattgcaggtttactattaggtatctcaattcatcttaaaatatatccattcatttacattccaacttcattattatttattgattcaaatcaatccatttggcaaccaattacaattaaaagattactttacataactggtgttataataggtttctcatcattaacttattggatgtacatcatttatggtatggaatatttaaatgaatcttatttttatcatttaataagattagatcacagacacaattttagtatttacaatgttttattataccttaattcagcaatttcatcatcatcagctgctgctgctgctgctacatcaaatattctaaaacttgaaaaacttgcatttatacctcaattatcattatcacttataataatccctcttacattatcaattggatttaattcaaaaaatgaaacatttagaaacttacttctttataaaatattattcatccaaacatttattttcatcattttcaataaagtttgtacatcacaatatttcatttggtttttggctttattacctccatttttagtcaactctaaattaattaataagaaaggtattatattacttacaggttggatagttactcaagctttatggttatttaatggttggagattggaatttaaaggtactccagatattttcactacaggattattcgtttcaagtgcattatttttcctttggaatgtttacattgtttcggaattaattaatgatgttaaattacaaattagcaatgaattgaaattagttgataataaaaaggattaattgtataacttattaattgtataacttatatgtcaaaaacactcaacagcaaatggaccacaactacatatcatgatgatgtaacacatgtgatgcgcacaatgttactattaaatttgaaagtatcatgttgcttgattttattaattacctgttacaccgcttatctcttttcttttcaatatattgcggtattcattatagcaatatactatcaataaacactagcattataggtacaattacacttatctatccattcatttaatattccagatactatattggaataatattcacttaaaaaatttcgattccctcgtatatctcgtataaataattaatttagttaatataatgtgggaaacatttgaaattcgttcaaaatcatttacaattaaatgggtcgaagtaccttcaaattctaaaattcaatgggatttaaaacctttgaaaaattcaatatatttaggtatttatcaaaaatcattaacaacaaaggaaaattccgtcggatatacttcttcaacatctacttcactggttgaaaatttaaatgttgatgaagttaatgaaattcccacatggattttttcaatgaaaataagtaacaatttgaataataaacatcattctggtggctcaaattcaaatttaccttcaacaagaacttattcatcagctagtactgacttcaaataatgattcaacttcattagaatctaaattagataaacaattcaataaaattaattgggttggtaaatgtgcaggtggtcaatttattaaaggatctgtagattctaaaaatggtggattatatgcatttgtgttcgataatacattctctaaaactaaggctaaaacatgttattttcaaattcgaaattgaaattcaaatgaaaatagatctaaatcttcaactcctcttagtgatgatgttaatgagaataaaatgaatcatcatgttaaatttgatgagaatgaaattttgaaaactaaaaagaaaattaatgattcaactattaataataaaagatcgagtaagattattaatattaatggcattcagtatcttacagggtttcttattaaagaaaagagaagaaagggtagtgctaaaacctttaccaaaagattcttttcattaaatttaaattatgcaattttgaattactattcgaatagtaatacttcaacaattagagggaatatgatgattacacaaacagttatctcagctgatgcaagtgaaaagttattatatttagattctggtgttgaacaatggactttaaaagcaactaataaggaagattttaaaaattggattcatgcattcaattttataaaattccaatacaaaaagaataatgatttgaaaaaaatttcaaataatcaaatccagactgcaattgatgatttattaagtaataatgagcaaacttatgaagatgatacagcttcaagtgataatgatgacgaatatgatgattttttctctgttaaaagtgatttatcaaaaggtaataagattagtaaatcaactacatataatccacattttcaaactgttgaattaaagattgaagaattgaaggaaatggttgaaaaattaatcgttgaagaagatagcaataatgatgttgaagaaattgaaaaattgcctcctcaccctcaattaaaaaattcggtgggaaattcatcatcaggtaaaactccgagaaggggatcaaaacctttatctttagatattccaacaaacaatgcttcaagtactccattgatgaggaaaccttcttttttatcaagattgaagaaaagaagttctaattctgttccaagtactccaatcgatagaagatcttttgatatagaaaacacaaacaatagtaacacaacaataaataataataataacaataataactataatgattatagcattgaagaagaaaaatcatctccattagttccaccggctgaaactgtgagaagtcaagcatgctcagtttcttcacttaattcatcaccagttatcggtacaattttagaaacaaggaaagactcattaaagacagttttagaaaaaataaaagaattagaattagagtattttgaattactgagatcagataatgatatgcatacatctgaatcaagaaaatcattaactcgtacaaatactcaagcaaaatcattattatcacaagaattttacgatgcacaagaatatgttgatgaaacaagtcatggtgttgttatgttatcaaatgatagtgatgaacaattagttgatgattctaaagaacaaactgaattaagttataatattttccaaaaagatttacaaatgacagcaaatgaagttttgacaacttcatctgatgaatctgaatcggaagataatgagccagttacagatgttaaaactgagactgcgcctaaacctgatgttgatgaaaaagatgttgaagatgatttatatccattaccttataagggtaagtatattccgaagaacagacattaaacctgcagcatgtgaaccaccatcattaatttccatattaaggaaaggtattggtaaagatatgagtagtttagcaatgcctgtttcaactaatgaaccattatcatttttacaaaaatacactgaaagtttagaatattgtaatttagtaaataatgcaatgaaatcaccaattgaaactggagaaagaattttaaaaatttcagcatttgcaattagctttctttcatcatataaggaaaaggttagatcaacacgtaaaccattcaatccattattaggtgaaacatttgaattgattagacctgatttagatatacgtgttataactgaaaaagttattcataaagccatttataatggcatcacatgttgattcaactaattggtttattgatcacacaatttgtccacaacaaaaattttatggtaaaactgctgaaatttcaattgatggtacattaaaactaaagtttagagatagtgaagaaacttatgaatggaatcaacctaatacgattttaagaaatattgtttcattgactggtgataaatatacagagcctgttgaaagtataactgttaaatcaaataaaggactaaaatgtattgtttcatttatacctgaaaatggtagatttacaagttcaagatctgaaaaagttgaatttaaggtataccatgacaatgataaaaagaatagtaaaccattaaaattaaatgcatcaggatcatggacgaatgaaattaaattaaataatggacaaattatttggaaaatagctaaaccaattcatcaaagtgataaaaaatatggattttacaaaattttcatgttgtttaaattcatttgatgaaattcataatgattgttcaccaacagattcaagaagaagacctgatcaaagaatttatgaagatggtaaagttgatgaagcagatattttaaaacttaaattggaagaagatcaaagaggtagaagacatgatagtaatggtaatcctgttactcataaacctgcatttttcattaatacatcatcatcaaatcttgattggaaatacattcacggtgagaacagttattggaatcgtagaaaacatggtaaatgggatggtttaagttaaattatggtagaaattaacgtaaaaatatattgtattttaaggtataagaatatgtataattaaagaatattatttatttatttattataaagttatcaatcttttacttctctaaagaaatatttatgattttgaccaccagtgacgactaatctttgatcaattaatacagaatcaattgaaaatcctggtacatcatcaatattattttgattattttgattattacttaaatgaggagataataataaagataattgttcatcatgattgattgcttcctcaattgcattttcaatagcattttcaacaatttctttctcatttgatatattaatgaaaaataaatgaagcaaaaattaatactatacccaatatataattaaaacttattttcataccaccattaaaataagaatctaaaaataaactaattggtattgcaagtgataatgataatgaaacagataatggagatgtaattaatgatgcatatgaaccacaataatcagataatgcattcaataatgatgacaatgttaacattattaaaatattataattttcaggtaatgataattgttcccaattaaaataattaaaaattaataaaattggtaatccaaaaataattgaaattataccaatataaccataaagtaatgaattattatttgaatctgtttgttcacctaatttaattcgaagtaatactaaaaatgctgaataacagaaagcaccaataattgctaacatatcaccaaatacttcagaatgtttcccccaaatgaaaactacagttgtagttgataatgttatcagtatgataccaaataatgaacaagagactgaaattaatttaccaaatgtgaatttctcaattttaaataaaacactgattaaaagggagaatactgatgatgaagttgctaaaattgtaccatttgaagctgatgtatattttaaagctgatgtaccaagaaaacaacttgatatataaagaaatgcagcaaaagctgcaattttaataatttgtaaatgagataattcaactttgggtatttgtaaactatcaataactgataaatcattatctgaatttgatactgtttcataatttgatgattgatcattcaataatttatcttctttatctttcgattttataagttcataccattttttaaacacagctgaaattccaaaaaatgtgaaaaaactactgtttaaataagcagcaaataatggatgtgcataatcagtatatttcataactctatttaataactgaacagaaagaatccaaaagaatacaccacaaaataaataaaatataccagtgatataaacattagtctcctcagtagcaattatatcaacaacttcatagaaaatttgatcaccagtgattaattcatcttcatcatcattctcattattatcaataaatgaattgcttttaattgttttaaaacttggagattttgaaagtatcagattagtcaaaggaatcatgaaatcttggtgatttaatcaatgatttaggtgatttaaatatctttgcttctgtttttctatcactatccattgtgtatacaacaattggttaaagaagttaataaaaaggaaagaaaaaaacagtaattgatctgatcattaacataaatttaatttggcaaccccttctgataagaaactgagtaaggcggctaagcgactaagaaaaaattttacatgttgagataagcttagttacgtaagtggggtgataacgggtaacttgagtgatatcttgtaagtaggattggaagtaatgctccatagtataacattcatgagatgaaaaacattgctggaccaaatcagaagaataatgtaacactgttccaaagtaaatgacaaaaaattatccacttgtttgaaatactagtgcttaacataggctagtgtagacactaaagtattctatactacatcgtaaatatttacaaaaagttcacccacttaaacaatcacccgtttgattcattgaaaattttgcatcatagtaccatagaatcatttaactcttagcacagagtacaatgcccagcctaatagtataaattgcctgacaatttcttaattcatatacgttaatttccaaaataattcttccgttaatgtagagtgaactaatcgattggaagataatttcgggtgaaagattaataaggcacaagagaacggggaacaatttagcgaaaatttgtgggtgggatcacttactaatattgaaattgaaatcaagtgatctgacaagacattgtgttctgaaaagggtaatataagtggctagaacttatccactttaccacagcatgtgatgtaacatcgaaattttttaattatataagttaaattagccattgttagatcatgatatatagagagttataaataatatttaagtgttcgtgtaattcaaaatgaaattgaaaataaaaattgaaaataaaaatcgataatgaaaatgaaattgaaaatgaaaataaaaatgtttctaagggagctcaactatgtaaactgagaaaatattgatgattccagatcaatcaataaatcaaagttgttataattgtaattattcaaacataaaaatcctgtattaagtttgaataagacgaataagaagaataaggaaaaaaaatccaagatatatctgtggttaatagaattgaattgaattgaattgaattgaattgaaaacgtaatagaataaactggaaacacaaagcatgataataaaatggaaaaaaataagttatcttattatttttttttctaatttgtaagtttaatttgtaggaaagttgagataatttttgttatttaatataattcttctaatcagaattacttaaacgttttagtattgcaggtggttgataaaatggattagttgctctactatttggtggagaagtaattctttgagttgaattatttgattttgacattgataaactatttaaagttgataaaacaaatgaaccaacagattttgatcttaattttgaatttaattttaaatttgaatttgaatttaagttactagtaaaactgctatttgaacttttagatagatgaagtgtaagattttgtatatcatcaattggagttgttggagttgaacttgcagatgaacttaaactactattaagatcaaaataagattttgaaacttttgaatttcttcttgacattggagataatgatgaagtatttgaaattgttgaaataatatcaactgatgaatgtctctttttacgtaatttttctttaattttatttgtataaattatatttgaaacacttgaaaaatcatgtaatgaattataatttgaaggtaaagtttcaaatgatgtcgttgataaattattatgaggaatttcataagtatttggaaaatcaaaagaattttcatcaaaattttgatttaaattaaattcattagggaaaaatgttaaatcatcaaattgactattatcttgaattatatcttcattttgatcatcatcatcatcatcatcatcatcatcatttgttttaattgtaacattattgatgaaaaaagtatcctgattggtatcatttggataatctgaacccattaataattgcttcaattggatctatatcattagataattgattattattagtaatttcgatgttttcaatactaatattatcaatatcctttccattatgattttctttatcacttaaggaaaagttatctaaattttcataatcataatcataatcaatttcatttaaattattgttattgttattgttattgttattattaatattgttaaataaatcaattgaatgaattgaatttctaacatccatcataatgtattaaaaacttataatcttatattttatatttaattgttgaaagtgcgatgaagcgggggagagagagagatatgttgaagagataaggaaatgttaaaagcgtgaaatagcaaacagagagcaaagcaaattaaagcaaattaaagcaaattaaagcaaattaaagcaaattaaaataaagctgtttaagttaggttattgttgaattaatgataataatctatggtatagtctggtttgtttattaaaaaaatagtaaaagattgtagaaaatgatactaatattgaattgataattatgatgatatgtggtgtagttttgaggataaaacacagaagttctgtccaatggaatgggatatagatgaaatgaatggaaatgagatgagatgaaggaccaagaagagagagatattattaaactaaagtaagttaataaattagataaatattgaatagtaataaataataaatgttttcaaatcatagaaaataccaagcaataatcataacaatataagaaaatcattcaagattgaaaaataatcaataaaaggtggttatattattataatagtaataataaaatttcagatgaaacctgtgataataaacccaatacaatgttacaatgaaaaaacaataagggattaattgtttaattattccaacggtggtttcagaattatcaaatgagaaaaaacgtacgtatctacacaattattatttatttttcccatattaataattaccgatatggttattttagttatttataataattgattgaattatttacgatgcttaattaatccttgtacatgtacatagttcaaggtagcagattcagtgaggtaacacatgattccatgtgtagtactgtaataatatactcgggtaaaggtaaaaagcttaagtaaaatgtgatgcgtcactaaagtttaaagagtaggactggactagtcctaaaggggaaatttatagtatttaatatttaataaattttaatttaataataacggtcttattatataccattagctcctcaattattgtatttaattggttatttaattacattaagtatattaaatgcccgcttttatccttttagactcatttcttcatttccccatagtttgactagtattagtctaaaaaaaaaccggtattcacgttactaataccctgtctgtatcatttaatttaatttactatatcaatacatactatacacttataatttacacacctaacaacacaaaagttaatcacataatatatacacatgtaccattacccctttcgtaacaatcacatctctccttaaagttaaaaaaaatgaattttttttttaatttttttttactattttctcattaattctcatcttattgttaacttcgcttgcttttctaagccttttaattaaggatatatttgctatattcttatactcaatacactttataacgtaataaaccttatcaccatcatcttactccagtttcatccctgaaatgttctttttatttctttttatctaatcaaatcggagttttttaggtttaatccttaattgttcctcatccattgattctttaaaatgttcacccgttctatgattaacatattcaatttccttaatatctttaatctctttaacctcttttcttgtttcatcttcagatcttttattacgttcctcaattccaagttgaaatggatttttaaccttctcatatttaactccttcagaaataattatcgacccctttctattatcactatcaccactaccactactaccactactgccttttaatccaagtcctttattcctacatcttcttcctcttcattatccctttcattgtttaataatcctcgtattgacattttatgtctattagtcattgttggagtatgaagcaaatcctctttaccaatttcttcaaattcaagctttttaggtttcattaaatcttcaccattaaaattactttcaatgaaaaatttctccccagttggatgataaactaattcaattcctttttcaaattttgaatattcttcttcaattaatcctttattacttctctttcttgatccaataaatggattatcaaatttctttcttttcaataaatttaaatctttattagtatcattaaaatcaagtaattctggaaattcacatctttcaacaccatgttgatgtcgtatatattcatcattgataatttgtcttggtggtgtacttggacaaattgatttattattattaactatattcatcttgctttgtaattctaaactttgtctctctcgaagttcttcatcactatcacattcacttgaggcgtaattcattaacctttgttctttaatttgttcttcatcctcttcttcctcttcttcctcttcttcatcttcttcatcttcttctacttgtattttaatagaattacgaaattccagtatccccatttttctattctcattgttatgatgttcattctcatgttcattaatacaactaccaaaatttcgacctgtaccaacattattaacgttattaacaccaaataatttattataattaccattatgggtattactatcaaaataaattgattcaattgtatcacgtttcctatgatgatgtcttggtgttgcttctggtgttcttaataaatgaactttttgtttatttttattaatattatcaatcatatgatgattacccttcttggtattagtttgtggtgataatggcagtaaatcttcattatcattattaccattattattaacatatggtgtagttggagtaaataaaacagaattattttgataattcttataatcaatacttaatttattttgattaaaattattaaaattatttttattaaattcattactacttattctacgaccattattattatattcatttgttgatgtcttttcatgattctttaattgtggtgtagtgaaaaatggattgatagattcatcctttgacggtggcggagttgatggttgacgataactcatattatattcttatcttttttatattttttaaaaaaatttggaatattttttggttttctgttcaatgatatgatataatgtccgaccttgtataagttagcaatagtgtccttatgatagcaaagtgaggtaaagcaaggtaggtagtatacagtaaaggaaaagaagttgttgttattaatcaataataactaatttgatctcattcacaagctgaaaaaagaatattctttgttgttattgtatggttttgttattattacttaattatttatgtttttattagtatttttatttttactgctggtttaacatgcacagagaaccagccactcataataacaataaaatcagcgaagtttttttgtttttcaccatcgcttgcttatctaatacttaatattttacttcaatatgattacctaataaagtaattgtcctatttaggaaagtatattaatctataaagtattttatacagtggattcaccatgttggatgtaaaagataacagtaaattctttttctaatttcttcactttcaattgtataatcttctggaaacattggtacatgccaatgaatcatttcaactaattcaacatcaaaattaaattcttcttctgcagttttgaaaaaatttaaatcattttcaagtaaatgtggtctatgtggtgaaaatacaaccaaacatttaccaccacttcttggcttcccattatttaatggtttaattaattctttgcatgattttaaaagttttttatgttcactgtgattgaaaactaaatcactcataattaaaaaatctgccttaccattattctcctttaaaagtaaacttatatcttctgttgaattaccccaaataaaaccctctggctttataatatctttagccggtggatagcctaaatggtcaatattatattgtatattattaattaactcaggatctggataatctgtactaataacttttttagcattatttaatgatgataataaacatggtaatgcactagcagatccaaattcaagaacaaatttatttttaatatatttttcataattcttttcaataaaatctcctgtatatatccctgcgttccataataaatgcccccataatggcgatgatccaattaatcgtaaattaatttctgttatattatgtttactttcatctgtacaatattttctctcgtatttaacgaaatgtgcctccggtggtggtggtctaaaatcttctggttctacaaacaatccaccctctaatgaaaattcatcgtctgacattgttttgcggatacataatgaatttgatgaaaagttggttcagtttaatcgatgaaaattatattttctaaatttttcattgagaaaaaatatcaacaaattttctaaacatatcgaattagttttctttctttacaatatattttcttaacacaatacagaaaaaaccactttatataatcaatgataaataaaaaataacagataaataaacttattacaataaaagacaaaagtaatgaaattatggacatgttgtaacttcccaatctgaaggatcatgaacatttggatgatcaagttgtttcatttcatcttcacttaattgaaaaattaaaacatcaagattaattggtaatctagatagtgttttagttttaggaattggaatataacctttttgtaatgaccacctaattaaaacttgtgcaactgaaatatttttcttttcagcaattttaactgcatcctcatcctgaagtctataagcatgtgataatggtgcataagcaataacttgcatatcattctccttagtaaatttacataattcatctctcatacaccatggtgaaacttcaatttcattaacaactggtttaatctttaatccatcccatgataataattcctttaaatgattaataccataattagatacaccaattgatttaacgattcctttttcaacagcttcttgcattgccctccatgtttcaagtctcatctttttaccttcacatggtgaatgaattaatagtagatcaatataacctaaaccttcaactgttttcaaacattcattaattgcagatttagcattttcataaccattttggttattccaaagttttgtaacataataaatatcctctcttttagaattggtgtttttcttaagataattaataataccatcaccacaaagtttttcattatcatatagaactgctgtatcaattaatctataaccaacttttaaaccttcttcaacaacttcatctgcattcataacttcccaagtacctaatcccatgaatggaattaatgttccattgtttaactttatacttttgccaattacactcattttggttaatgatcttataagagagaagtggatgataaggatggcaaccggattattcacaatttatattgatttgttatcttaaatccactatattaagcgtctatcccagttacggaaatagttacctattcggactaaaaatttttccttcctcattatcccacattatcaatttgtaaattacttttgttaatatcttgtgcgatataaatgatattaatgtgatttatagatcaaaagatgcagggaggtaagctctatcgattgaatgtaattttagcttaatttgaaaccttgcatttttacaaaaaaatagatccctattcccaaacataaagtaatctgttaaaaagtattttaaattaaaagttttataaaaaattaattattaagtcacaaataccacatccaaggtataagctacttgtttcttatactataacattattatatagtgatattatgataataacgaaccatttaacattaaagaaactgataactaacacttaccacaacattatcaatgtcataaattttacagtagagtaatgctcgctgagttaaaaaatttgaagcttttattcagtattaacgagccaccaatagttaaatcaagcaaagattattataaattcgaactacacaatcctttaaataaatacaattatattttataaaattgattaagtctaaagcagaaactattttattcttattctatttttttggtaaaccagtttctaaatcaattaaaacatcatcagtttcaactggaccttcaccaacttgagttaaaataattcttgaaacaccttgagaataaatttccttatctaatgagcttaatgggaaagaatcaaagattttggcattcgcaggattaaatttatcatttgaccaaccatctaatttatcgaaaaatttataaagcatacctaaaacataatcttgattttcttcttcataataaataacagcatttggaccagcatcaaaggtatatgcaacaattaattttccagcagcttcatttaataaattgattaatttaataatatttttagatgtatcattaagatagaagatcggaggataagaatctaaacaaacagaatggaaagaatttgaatctttcattgttaattctgcaaatttttggaaatttttatttaaaatagattccttcatttcaatatatctctttggtacaacttcattaattctatattgaaataaatcacttgttttaacagttaattgcataccacttgtacttggaacatcttttttcatatcacttacaactaaaattgctgctttcattgttggccaatgttttctatcagcaatttgaattgcctttgaatcttcaccattttctaaatttcccatttcccatgcaacataacctccaaataatgaacgacatgcactacctgaaccttttcttgcaattttacttaattctgaataatcagtaggtaatttatataatttagcaacagatgaaattaagtgctgcaaagccagcagctgaatgatgctaaacctgcagccgttgggaaattattttcacttataatatgtaatttaaattgtgaaatttttggtaattcattatttgaaatttctaattcttctcttaaacttcttaaatctttcaaaacttgaattgaacgtggagtttctaatgaatatgtttcaccattaatccaaagatgatcttccttaaatgattcagagcatgaagctgttgttaatgtttttaaatcattttgatccaatgtaacactgatagaattattagttggtaaattcaaatctttgtctcttttaccccaatattttaaagtagcaatattaacaggaccagtagatgtagcgtaatgaatttcaggcatatttgatatgaattggtgtcgattgattgaaataagatataaatatccttacaaactgtacaacctggctcatcaatgaaatttttgttcaccaatgcattcaacgccaaaacaaaaaaaacttgtgcggtacgaggtggatttcgtttaaatgaaatgcctgcacattggactgtgtggatatacattttacatgttaacttaatttaaacagaaatacaaatataacagaagtatagatatacaatagaataaaggaatgtagatgataataataataatcaataatttaattaattgagttcagtaattttttcccatttccaaattcttgctttacaatcacctgaacctgttgcaaaataaccaccatttgaattaataacaggtgaaacagaaacgctaataactgaatttctatgaccttgtaacattatataaggttcaccagattctttatcccacattataacacctctatcttttgaacctgataaaataaattcatcatttggtgtacaacaaactgacaaaacaaaatctttatgaccaacataagtaacttcacaatttgattttgatatattacttggttgtttatctaaatcttttaatgaccataatttaattgttctatctaatgaaccatgaagcaatttctttaccattatttgtaaatgtaactgagtaaactgaatccatatgaccattaccaaattcatttgaagaatctaatctttcaactaaataacctttatttgcatcccaaactctaacagttctatctaatgaacctgcagcaattaatgaaccatcaggtgaaactgcaactgttgtaacaccatcttctatacttaaagttaatgaacattgaccattaaatacatcccaaattctaacagttctatcacctgaacctgaaactaaccttttaccatcagggaaaaaatctaatgaataaatgtcttgttcatgaccttttaaatattttacaattgttctagttgctaaatcccatattctaataattttatcctctgcacctgttgctaaaaatttaccatcaggtgaaaaacaaactgatctaatatataaatcacctgtatcagtatcataattaccattatttgaaattgatgattcatcatttaatcttgcaactaaatcacctgtttcaacactgaaaacttgcgttaatttattacaaccagttgctaaaaatttcccatcttttgaaaagctaacacaacaaacaacagaagtatgatcaaatgaatgaactaatgaaatatcaactttctttggaatacttggattataaactaaataataatcattatgttgctttttataaggtaaagtttgatatgcatcaaaatcttttaaaaatgcaggtattggtttattatgttgagctctcttaattaatgattcttcacttgatttttcaactttttcattattaccgttttctatcttttcatcagttgatttttctttggttttatcatttgattcattattttcattctttttagcatcattcactaaaactttatcacttggtgaagaagatttctttaaatcgtttatattatttgaatctttttcgttcttaattgtactattattagtgttgttgttagtgttattattgttattgttattatctaatgaagatgtaagcggtggtaaaccatttgataaagtattattagaatggtgaagttgagccttggaaagtattaacagttgaagctaaaggagctaaaggagttaaattagaatttggtaatggtgcacttaaattaggtggaggtaattgttgagcgttaacttgagcttgttgttgagcttggaatttgtgcttgagcttgtgcctgtgccttgcgcttgtgcctgtgcttgagcttgtgcctgcgcttgtgcctgtgcctgtagcttgtgcttgagcttgttgttgagcatgaacatgagcttgagcttgttgagcttgaatttgatgatgttgatgttgttgttgaagagaatgttgttcaagaagacgatcccttacatctaattcttgttttaacttcataatttcacgttcatatgcatccttaattgatctatgagcttgttctaattcatatacagtattactgatatttgctaattcttgatgctgttgatttaattttaattcataatcatgatgatcatccttataacgagaagtttcccttgtaagattatcaaactcagcctttacagcatccaagagttcatccaaacgagcacgagatgacattgcagaatcagttgtggaaagtaaatcaaataaatgtacacaatttcagttccaccatataactaattcataacaataaatttacatcagcaacaacttgtcaaattaaatgacggaaatttctttttcgggggaccgcaggtcgatgggtcgcttcattatgtcatcatgttctttattaatatgatactttatcagtaactatatataacaatccacaactgacatgcatttgaggagataaaggattgattggagtaattgatatacaaatcattctacagaagtaatgagtactacggagttcttggataagggagtggacttgattaagaaggctattgaagctgataattcttctaaatatgaagaagcttatcaattatattataatggtttagattatctgatgcttgcattaaaatatgaaaagaatcaaaaggctaaagaaacaattaaggagaaatttactgaatatttaacacgtgcagaggaattaaaggatcatgtatcgaataattctcaagttgatcagaatggtgaaatgaattcatcatctggtaatacaaagacgaaaaaggtagatcctaatagtacaaataatgataatggtaaaaatggtaaaactgataatgaagatgatgcagagaataaaaaattaagaagtcaattagctaattcaattttatctgaaaagccagatattaaatggtctgatattgcaggtttagaaggtgcaaaagatgcattaaaggaagcagttattttacctgttaaattcccacaactatttagtggtaaacgtaaacctgtttcaggtatattattatatggacctccaggtacaggtaaatcatatttagcaaaagctgttgcaactgaggcaaattcaacttttttctcagtttcatcatctgatttagttagtaaatggatgggtgaaagtgaaagattagttaaacaattatttacaatggcaagagaacaaaaaccttcaattatttttattgatgaagttgatgcattatgtggtccaagaggtgaaggtgaaagtgaagcttcaagaagaattaaaactgaattattagttcaaatgaatggtgttggtaatgattcaaatggtgtattagttttaggtgcaacaaatataccttggcaattagatagtgcaattagaagaagatttgaaagaagaatttatattgcattacctgatgctgatgcaagattagaaatgtttaaattaaatatttcaaatactccttgtagtttaacaagtcaagattatcatacattagcaaatataactgatgggtattcaggtcatgatatagcagttgttgttaaagatgctttaatgcaaccaattagaaaaattcaaaatgcaacacattttaagaaaattgaatcatttgataatgaaactggaatttcaaaaattcaatatcaaccatgttcaccgggtgaaaatgatgcaattgaaatgaattggatggatctgaatggtgatgaattacttgagccagatttaacactaaatgatttcttaaaggcgataaagacaaataaaccaaccgttaatcaaaaagatttagataaatttgttgaatttacaaatgatttcggttcagaaggtaattaattataactattaatcaatcaaatataaatacacaatacgtatactatgtaatataaaatattgtaaatcaatttagattcaattcaattaaatttttcaacattattgttagaatctgatacttttgattcattaattttaattaaaataaatgaaacatcatcaccattaataaaggcctttgcatcaggattttctaataaatgtaaatctttataatattgatatttctcatcatctttattgaaaatttgataaacataaccatctaacgtaatacttatatcaccaacttgattttgattaatattttgtaataattttaaaacactactatcatttgattgtgcattatttgtatttgtaacccaatcatgaactaaaactgaaacatttttattattaattaaattatcatatttcttggtatttttacaagttgcaactaagattaattgttcatttttatctttattattaataaatgtaaaattcattaaactaacatgagggcgatctttatatgatgtagctaaatgtataaattttgaatttgataatgagtcaatgactttctcaggtaatgggccactcattattgtatgttatatagtaagattatctgtttgaatgtattaaacttgcaatcaggtatattaataatccagggctgattaaaaaaatcatgcgttagaaattgtgacagagtgcctgcattaaataatcttgattttaagaaaacttgatggctccgcagaatttgaagtgcacaattttaagtctctgatctaagtttttggtgtaagaaatcttgtagtagttgaagaaccacttcatatatgcagtattctacgcgtcgaaggagtagcacagagtctaaatatagcgaagctgattcacagcaattaaatgatctattacatcaaattatacatagcgataatgatgatgatgaaaatggaattggtgatgatgataaaattgtagttaatgaaatggatgatgttgatagaatatttcaaggtgatattagaacaatgattgtcaacgataacgataaattaccagttgagagatatttatctcaaaccaaggaaaataaaggtgataaaccatcattttttaatggattgtataaacgtgtcaaaaatttgtttgtttataaggaaaccccaactactgataatcatgaagaaacttaagagaccaattataaagccacctgaattacaattcaaaaatataaccattttaggtagagatagaaatgaaggtggtatacggaaacctagtataccgaatctacgaaacaagaagaacgaattgaatgagaaattaaaagaatttatcaaagagggcaaggaaaaaaataagataaatttactagaaactatattaaaagatacagaagttgttaatgtcagtgacaatgaagagcaagttgtagaagagagggaacaagttgaaggacttcgaagaggaaattaaaggaattgattcaaaaggaaaaagaggaaagagttaatgattccaaaggtcttgatgaagaaatcaataagttacttaataaagagaaagagatagaagcaggagacagtagtgaaaagggggagattgtcaatgaagatgctaatggatatacaaatggtaatataattaataataataccgtggaaaactatacagtggagaatgatattgcgaataatgagattgggggtaatattactgtggatactcatagagttgatagtgatatagttgattatgatataccagataatgatatacatactgattcaatgagtacggatgaaataattagtgatgacatactaagtgataaggcagataatcatatagataacatagataaagtcaataaagagatagtcagtaatatatatgataaagagtcagacagtgaagttattgaacaaccagcaacaacacaagaaagcacacaggaaagtacttgttgaagatgattctttagtagagatcaggccaatagaacaaccacaagtacataaaacaaagagtattcaggaaatacttaatgaaaaaacacatgttaaaaagccagatcctatcattgagaaacctattataaagaaacaaccaaaaattattgaaacaatcccagctgaaaaagttgatgatatcaaaaagaatagttattttgatgccatcaaaagtattacacgtaaagattcactgaaaaaggttaaaaagagaaataacaaaagaaaaatagtgtatagtagaaatgaaagtgagagtgaaagtgaggatgaatatcatgatggcgatgatgatgataataactatgtgaatgataaggaagatcatacagataagctcgataatgcctcaaatttgcacagtcaattttggaaagatgataagcgtagggaaaagagtattttattcaaggtggacgataaaaagaatagaaaatataccagtgaattaattgatgttaataaaggtatagaattacatagcggaggattatttgaagaagaggaagatgttgtaccaaagaagaaagcagatgtagaaaaacctatagaaaagtcaataaaaaaatctaaaaatggtaaaaccaaggagaaacttaagaagaaattaaaggataaacccaagactaagattacggatatatctgtggatactcctgttgatcaagatgataaagcagataaaccagaaagtatatcagaaggactttttgtaagtgaagactacggagacagcaaggacgcgtcagcagagacgaccgatgaggaaattgaagagattggcagtgcgcgaattgtgaaaaagccgaaaaaattgaaaattaacaagaattactatgggaaggtaaaatttgtagaggaagagaaaggtaagaagaatttgaagaatttgaagaagaaggggaagaggagaaagagaagaaagaggaacttaaataatgatgaagtcattgagattgtttgtctaagtgattaatattatattatatcagtatggaaagtattagaaatgttgtacgagagggtggctcaattatagtggttggtagtggaggttcaggtaaaacctacacagtcgaaaaagttttaaaagaggaaaatatcggtaatgataaagataaggaacaagttatacgaataaatggactcttctgtagagatgattcatcagcagttaatatgttgaaacagaaattaaatgatgatacaaaagttgtaattgttgattttgctgaaactttcactaatggacgtcaaacattattgtatagattatttgaaaatgcaggtaagagaagatttgcagttatagttattacaagagatgtcttattgagagagaaattagagaagagagttcgaagtagatttagtggagttgttgtatttatacctaatagaaatacgtataatatgaagagtggtagactactagctgaacaatcactatgtgaaagagagagacaattacttaagagtcgtaatgaatacgatgatgatagcagtgtttcctccagcagtaacaacaagtctatcatggatacactgttgaaagaacggataaaccaacttaatttataatacttacgtaatacctcacctcactggtttttctgacatcatgaatttttcagctttttttatgtttccctgaataatgttgaaaattgacatgtattcacaagtaataagttgacaaggtcttcggatgagtgatgatcggggtctgttttctttttattcttttgtatatctatcttttacttataatataatttatattctaatacacaatttaaacaatggatccaacacatgcaccagattttcaacctcctaatactcacccacctgagtctccaactgttactccaactttaatacccaataaaaatccaattcttaaacccgtattagccgattatctacaacctctggataaacctattgatcctttaacttcaaactctcataacaataataacaataataacaacaacaacaataacaataatattaataacaatagtactactcgtaaacagaaaatacctaaaagaccaactcaacttgaaccttttagttcaagttcatcagatgatgaaattgattcacatggttttcatttagcaacttcattagattcacctccaaaggttcactcatttcaaattgctgatcttgaagaagtacctcatggtatacagaggcaatctcaaaatttatcaacttataatttcccaactcatagattgaaaactaaaatgtcttcatcacataaattcccattggttatagttgcttgtggttcattctctccaataacttatttacatttacgaatgtttgaaatggcattagatgcaatacgtgaacaaactcgttttgaagttattggaggttatttttcaccagttagtgataattatcgtaaacctggtttagcatcttcaaaacatagagttagaatgtgtgaattagcttgtgaaagaacttcttcttggttaatggttgatgcttgggaaagtttacaatctaaatatactagaactgctttagtactggatcattttaatgaagaaattaatattaaaagaaatggtattttatcaaaagatggtaaatcaaatttaggtgttaaaattatgttattagcaggtggtgatttaattgaaagtatgggtgaaccaaatgtttgggctgaacaagatttaaatcatattttaggtaattatggttgtttaattgttgaaagaactggtagtgatgtacgttcatttttattaagtcatgatataatgtatgaacatcgtaaaaatattttggttattaaacaattgatttataatgatatttcttcaactaaggtaaggttattttaagaagaaatatgagtgttcaatatttgttaccaaatagtgttataagatatattcaagaacataaactttatctcgatgaaaaggaacctgttaaattagtcttaaataaataaatttttattctttagtattttatataaatctaatatctaattaatatatgaaactatgaaaaacttaaaccattgtaactaattcttctgcagaggttggatgaattgcaacacaactatcaaaatctgccttagttgcacccatcttgattgcaacaccaaaaccttgcaatatttcagctgatgcatcaccaacaatatgtaaaccaacaactttttcacttaatgatttaacacaaactaatttatatgcagttggtgatttatgttcactcattgcataatacataccattaaattttgacttataaattttaacatcatctttaccatattttgcaactgcttcatcttcagttaaaccaactgaacctgcttcaggatgtgaaaaaattgcagttggaacattagtgaaatcttgcttttgatctttaaattcttcaggtccaaataatctatttgataattttctaccagttgcaattgcaactggtgttaattctaaatgaccaacaacatcacctaatgaataaatattttcaacattagttctttgatattcatcaacaataatttgttctctatcatttaatttaacaccaattttttcaagaccaataccaagtaatgatttacgacccattgtccaaattaattcatcaacaattaaagttgaattatcggttaaataaaccttcttttcaccagttgataatttttcaactttactgacatgaactttctttaaaattttaacaccttctttaacataagattcttcaactgtatctctaataattgaatcaaattttgttaaaactttatcaccacgtaaaatcatagttgtttcagtacctaaaccattgaaaacacctgcaagttcaataccaatataacctgcaccaacaatagcaactttctttggttgataatctaatttaaagaaaccatcagaatcaataccaaattcataacctggaatgtcttttggaataacggtttgaccaccagttgcaattaaaattttatcagcagtgaatttttcaattgaaccatcttcttttttaacaacttcgacttcaccattatcaccaaatctagcaaatccataaacataatcaacaccttcctttgttaaattacgttcatatataccatttaatctttcaacatatgcatctcttttatttttaaaagttggccaatcaaatgctaaatccagattttgtaaattcttaaaaccataatcatatgctaaatttaatttatgtttcatatcacttgcataccacataactttctttggaacacatcccacattaacacatgtaccacccattgctttactttcaattaataaagtttttgcaccatattttgcagctctacgtgctgatgcaacaccacctgaacctcctccaatgactaaatattgataatgggtcattcttgtctattataacctttgtatacttcacccaaaaagaagaaagtctacttacagtttcaaatcattgaaaaacttaattcgtattattaagctaaacgattttcctcactgtggctttttctttgatattttaataactgtgttgattaaactgtatattttcaatgtatatcgatgtttttatcttattacttttatacaacggaaattaaccaacaacccaatagcaatgtccacagaacctatagatgataccccactcacacgtccagataaaactcttgatgaattactttctttaatggatgatgcagatttcacaccaataattccagatgctgtaacagattattatttagctaaatcaggtttagatttatcaaatgatgaagagaatatcaaattaaaaagacttatagcattagcaacacaaaaatttatatctgatatagctacagatgcatatgaatgttcacgtataaggtccaacacagcagtttatacagcaaataatcctcaaacacgatcacgtgctttactaatggcaacaatggcaaaggctagaggaacaacatcatcaacaaacgatgaacaaggaacagcagacgatgttgatgaaccaagtgttggtaatggtaatttaaatccaaatggtgcaagtcaaaataaatcaaaggtaacacttacaatggaagatttatcaagtgcacttgatgaatatggattgaatgttaatagacctcaattctatagataagtgtagtgtattacatgtattataaatagaaaaagagtcaaatatatatatatttgttaccattccagatttttttattacattattattcttatattattattattatacattacatataattgaaacatggaaaacatttccttttccatccatcaatatcccaaacaattacaccttccattgtaccaattaataattgacttttatttgtattttcattacaagaaatttccataccatttatttcaatatctgaatcaacataaaagaatggatctctttgtggaatttcaactatttcttcaggtaaattatcttctaacaagttagggccaaacggccaaatatttgagtaatctttatattcattattccaccacatattaacttctttaataattgcatcatcagttatttgataaggttttaaaccactattattattatagcttactaaattactaatatatggtggtattaaattatttttcaccctctgtataaaatcttgtctatcataagagccttgcagagttatttgtgtattatcattccacatatgcctactcagtcttgaatttaaatatttataactttcaaaataacctaaatttaattcaccaccaaaatgtcgaatatctttaaaatcatcaatattttttataattggttgattataataagatattaaatttgaaggatttggagattcagttattggataattatatttttcatcatttattataggtggtgaatgatgtaaatattttggtaataataaaactgagtgattattaaagtttctagtatcaattaaatgaattctcccctgatgttcagaaatacagagtaaatcatcattattagcaatagttgttgatttacaaacacggaaagcaccaggttgagttttaggtcttgttgaatgaatttcatgaattggatttgataaatttcgtaaatcatagatcaatgctaaaccatcttggaaacatgaaacaaattgaaatccatttgataagaaagttgtagaaaatccacaatctccattagtatttattatatcaaaatcagattcattcatacttctaccattggaagagctattatttgaaccggggtgtaaaatatgtattttggaactatcacctagtgtaactaatgttttaccatcatccgataaaattgaatgatttaatgcagcctttaaataagtacttgtagatgagggtataattccggaaggtgttatatgaagagaatataagtgtttatcattattacaaagatatgaaacataatgatttaaggaagatctattaattgaaactgaattattaataaattctccaaattgataactttgaacgttattatcaatatcagtaaatgtaaagctacctttatgtaaaccaattgggttagaattagcattaatcatattatttatacctccggtaactgtaaatccatctagttgtttaatacaacgaggattagaatgtactttaactgaattacatagcaatggtttatcaagactattatctattgttaaatttgaatttgaatgtgagctattattatcattgttgttggttagattatccacatcatccatatcatcttcattatcataagtttcaggtacttggatattcagtactttattctgatgaattatcttaaaagaatttgttttattatcaactgataaaagatcctttaattgccaatgtggggatgataatgacacatttagataagtagaagctttttttaagatagaagcagcaaacctagtactttgaggacctgaaggcttactactctgataattaactgttggtatagttgtatcaatagtcattaatttgatggttaaaatccagggatatacagaatctatattagttccaattgtaaaaatttaaaaatagcactaataatagataaggattaagttattatacgggagttcagttcccctttatttcccactcactgataacgtatttgccctggtttcgaatcttgtaaaggtggtattatgaaaattatctcacttaaatgctttttcttgagggtgggttttacatgttaataattagttgtcattacatgggatcattgggtatatatttgttttggtaattaactaacaatggcttctatagtggcctttttagatagtaaggcccgtttactacttttaagagattataaaggtgatataccagtctctgttattgatgaatttcctctattattattaaaacaagaacaaggtttaaataattcatctgaaccaattatttattcaaatggaattagttatacttttattcaaaatgatggtatatatacagttggtataagtaaatgtgatgttaatgttttcaccatattggtctttttatcaaaattaaatgatgcattaattaaacatttcaaaaaattaaatgaattttctataaaggataattattcaattatttatgaattattagatgaaatgatggattttggtataccacaaataactgatgatttggttttaaaagattatataacacaacaatctattacttttgaaaaattaatttcaaatgtttcaaattctgcaacttcaactcatcgtaaaattaaacaaagtaaacaagatagaagagctcctccaacaacaattacaaatcaaatttcttggagaaaggaaggtcttaaatataagaaaaatgaagcttatttagatgtaattgaaagtattgatatgcttattaattcaagaggtcaaatgttaacaagtgaaatttatggtaaaattaaattgaaaagttatttatctggtatgccagaattacaattaggtttaaatgaaaaatttattaatagtggtttaaattcaattaaaggtttaacaagtgataacatcaataatgaatcaataacaaaatcctcaattgaagttgaagatgttaaatttcatcaatgtgttcaattagaaaaattcgaaaatgataaaattataacttttataccacctgatggtgaatgtgatttaattacttatagagttcattcagatatattaaaacctttattcttaattgaatataaatttaaaaatcattcaaatacaagattagagataatggttaaagttcgtgcaaattttaaaaataaaattagtgcaaataaagttgaaattagaatacctgtacctgaagaaattgattcaccaaaatttcattatcaaaagggtaaattaaaatatttacctgatgaaaatactcttagatggaaatttcataaaattgaaggtggtaaagaatatgttatgattgcagaattaatgttgttaagtttagttagtgaaagtgaattaaaacaattccgtaaaataccattaaatataaaatttgaaatgcaaggttttgtaacgagtggtttacaggtacgttatttgaaaattcatgaacctcaccttaattataatagttatccttatgtgaggtatattacaagaagtggtgataattatgaaatacgtagtagtaacgtataataagtatctcttactgttcttctctcttgtatattattatatagataatataatataaattatgattaaagactcttttatattaataattaatgtaactaagtaaaaaactgattattttatccattttaggaaattttgttttccatcaagcgactgaatttttttttactgttgattctgtgccatctaaatctatgaaagtttatttaattctatatcttgaacatttatagtagacacctaacaatcaaaactatggatattgaacaagcatataacgagcataaaactgctggtaataatgcattcaaaaaggcagattatgtattagcagttgaagaatatagtaaaggtattgaaattttagagaatgaaaatgaagaaactgaaattgttgaaaatataaataaaattgaaataattaatgaaaatttagaagatattagtaaacattcaaagaaacatgctcatgcattagctatattatattcaaatcgtgctcaagcacaattaaaacaagaaaattatggttcagcaattagtgattgtacaattagtcttgaacatgataatgaatttgttaaaagtttatatagaagagcagttgcaagttatgcaataagagatttaactgctgcattaaaagattgtaaaactgcaagaagtatgacaggtggtgatgatattaaaattaaaaaattaacaaatgaaattagtatggaattaaagaaaattaaatttgagcaagcaattgaaattgttgaaaaaagtatatttacaactattgattgggataatgcacaacaagaaaagggagaattgattattaatagaggtgaaaatggtgatattgagattgttgatggattaaatgaagattatattagtagaatgattaaaaaatttaaagaaactgatgaaggtggtttaataaataaaatggatgcatttgcaattattaatgcagcaaacacattatttaaaaatgaaagactgttagttgaaataaatttcaatagagaattaaagggtgtaaaagaattaactatttgcggtgatactcatggtcaattttatgatgttcttaatatttttcgaaaaatttggtaaagttagtgatgatcatgtttatttgtttaatggtgattttgttgatagaggttcatggggatgtgaagttgcatttttactctattcattaaaagtattatatccaaataagattttcattaacagaggtaatcatgaaactgatgatatgaattcagtttatggatttagagatgaatgtaaatataaatatggtgataaaatattcaaatgttttagtgaatcatttagtaatttatcatattgtacattaattaatgaagaaatattagtgatgcatggaggattatttagtgatgatagtattggtattaaagaattaagaaaattagattatagtagacaagtacagggacaaccaccaaagaatggtattgaaatggaacttttatggactgatccacaaagtgaaaatggtagatcattaagtaagagaggtattggattacaatttggacctgatattactaaggcatttattgaaagaaataacttgaaatatattatacgtagtcatgaagtacgtcaaaaaggttatgaatgggaacattatgataaattatgtacagttttcagtgcaccaaattattgtgattcacaaggtaatttgggtgcagttgttagattattaaatgaaggtaatgagattaaatgtgaaagtttcagtgcagttccacatccaaatattccaccaatgaaatatactaagaaccaatttggattttagaatttcattatgcattttatgtattatatatagagatatagtattttgtattcatagtaataatagcataataaaacaaacaatttacaatgaaaaaaagacatgtacgtttatgaaaaagatgaaggaacattgttaaagaaccaacaccacaagaatttcaccaaacaaagactttcttctcggagacgttgtagaggggggcgatcttatatttggcatcaaccaccctacaatatatacggctcctcaatgagttactaaaggaagaaacgtcaaagagaagatttatactaaatggaaatagcgaaatgcgtttcttttatagaaggaaaaaagttttaagctgatttttcagggttttgcttcctttatacacaatctctgatcaattgttaccatattagagaaatagcaatgaaagtgtggacactagtgtatatactgtttcttatattaggcattgaaagtttgtcattacaaatagtagacaaagatgatgatagtggaatgaacgatatttcaggattagaatatatcgttatgaaggaaggtaaagatatacataaaggtcatttcaacagtaaaggactagcccaattagactcaaatcttcctaccaatttcaccattgtagtaggtggaattcactacgaatggacagctgttgatgttaacaataaagatgatgatataaccattagcgtggcggtgcagaaacgccaattccacattgcggcgcagtcgccattagaaattgtatgggcctatattaagaagagaccattattaactggtgtatctctagtggtgattttagtggcattgttaccagctatacttattaaactagatccagactttgccgatagagtagctcaaaatgctatgaaagagaaagagcagtgaggtatataataagtataggatgttaaccagccacccccactataatataagtggcacaattttaaattttataggattgttgatagcgtgaattattttgcatctagtctctctggtaaagcccaaattaatgcagaaaattgtttctttttttttccggtaccttttttcttctccgtttctcttggtcaaagataacctatacagccaatgctgttctcagtcaccacagttggtctcttaactgtttggtatgctacttcatcactctcaagtcagcttaataaagctatactagtgcagttcccattcccattatttttgacagaaatactctttctaggaaatatgatattggctctaatcactgcaataattgctaaacattatcccccgtttcatgctgcttttccatcaaatacttttccatcaaatggactaccatcattcacaaaacctcttgcaaaacttttcttaccaatgggagttttccaatttgttggtaaattattagcactggctgctacaacaacttgttcagttgcaacagtatcctcaataagatcactaagtcctcttttcattgtattaggttacagaatattttataaagttgcgtttcctttgaaaacatatctctcattactaccattattacttggtgtaatcatcgtcgttctctcacaatcttcaataactcaaataaaatcagcttataccatcaatgaagataatacagaaactgttttggaaccttttaatatgtttggaataatttacattattatggctacttcagtttttgcagctgggtcaatttatgccaaaaacgttgtctcaaaacattcaaatatcaactgtttagctattggctctcatcaacataataaatcagatattgaaaaatcatctttatcaccacaatcctcaatacccaatcatacccttactactaataatacccacgatcgttatcaacattatcatcaacatcatcatattgataaactgacaactataatttattgttccatttacggtttattattttcaataccaacatttttaacttatgaattgaaaacaattttcaatttcagtgtaatatctcaaaacatttcattaccttattactcattgataccttggcatttattaattgttaatattatttcttattttgctcaaactttacttgcatttcatttactgacaatcttaccaacaatttcatacagtatcgctagtatgatgaaaagaattataattattgctattagtatatttttacgtgatgcaataaaccctttagaatggttaggtttaatacatatcgcccttggtttatacgtttatgaacgttggggtataatctattagtattctatctaactagtttattcagtttagtttagtttatcttatttaaaattgtatcttatatattcaccatttaatttaataccaccactaacaatttcaatttttttacagtcttcaccgaaacctagtatttcaccatcatctaaatcccaaatacaatatttcccttccacatcaatactaactgaaatactttcatcttcactacattgtatctcttcaatccttacttcatgttttcgaacacagtatttcacatattcacctccaacttcccgtgctactttaccaacacggcaattttcaattttttgttttgaaaaaacctttattaacccattagcatatccaacaatcttacatttatctccaacttctattccagtacctttcaaaacaaaaattgtttcatcatactttttatcaaacacttttctttgaggatgtgcagttttaaatagttgagttggaacttgtccaaaattaaaaatagacgatactcttatttttttactatgtctatcttcatcatccacccattcataactatttggatggaatacattcaaattttctactgcagcttcccccctttgtttaaatccaaatataagatcaatccaatgatttaaattcttactcacatattcactctccaaagcatctctcatcactttaataaatttagtaacatcaccttcactccacttgggcaactcaacactactcaactctaattcttgaccactaccaacaagaaattcaggcatgtaataaaattcaggtatcaattccctaacatcagcagtactttcaacaccacaaccaatccaagttctcaaaatagattgaaattgcctatctttaggacctttaccaccttgcaagttaataaatatttgtctaaaaggttcaagccttactaaatacgaactaacactcatacttgatgagtaatgtgtaccataattgaattcaccacccagctcatatctttctttgaattgtttacttctttcttcactttgagcacccattggcaatttcaaatccctatatacattctcatctttcaaatcaatatttgacgatgtataatctttcaaaatccaagggaaaataggatactgtgataaatcattggtacttcgtcccgcaaatttgttcaatttcatcaaatatgtaaaattactcattttaccattcgtccataactcgacaatttcatctaatccacaatgagaaggtttagctcccatgattcccgttactttttttaaaatcaaatctctatgataattgtctttacaagacataaatacagactcaccacttttggtaaataattcaagtgcaacatctcttaacaagaatcgtctttcactcacaatcttgatatctttatacgcaatcttttttgatttcattgcccttttcacatcattagttccacaaacttcatgcaatatttgtataatctcgtccctctcatcatcatcagcttcttgaatataacacatttcattgttctgctttttccaatatccttctagcatatataaatgtgtcaaaccgattatcaaaataccttcattggcttcaattccatgaattgtggcaatattgaatatttgttcaattctatcgtgaacaaataactcacgtaatatgcttcttgtacaatcaccagccaatatatcatcaaagattgggcttgaatattcttgcaaaataaccttatcaacaattttgttaaacttattatcaatcccaactctgtttttgagaatccttttcttttcttgattttctaccattccactccgttctttaagctctaaaaacttgtttataaaaaacagttcatctttgttctcatcacaaatatatgactgaatgttttgtaattctgcctcataaatatttttattgaatggtttaatctctttattaattaagttttcactcctttctaactgcattttactaaaaatgtatgattttatagttttgcttgaactattcgtattagtagctttaaccaaaaaatcacgatatgtcttatccatattttcacctacttctgtttcaataaacgcaataaattcatcatcatcaacaccagttgcttcttttagtttgttaatccagaaaatgtcacctttataatctaataccatcaaacgtatgcagttggtactcacagtcaaaacatcattcttctttaacaacctattaaaaatagaaaacaaaattaccaaacaagtttcatcaatgtttgacatgataaaactaaaatgtgccatatatatttcacaacatttgataacattttcatccatttttttttcaacaaagttgataaataatttaaaataagcattcaaaaatttggcaaatattttatttctcttgaaattgacggtttttttaataacctcaatactcatttccaaaacaattagaatttcattatcatccatccaaacttcatccaaacaatggtaatagtcttggaatatgttcagaaaatttcctgattttttatatgtttctaatttgtcaatcaacatcggaacaacaacggcattaaattccacagggaaagaagagctaatcgattccaaaaggtcaatattgatatctccacaaactaaccattcattaactatgcttaaaattcttttctcaacatcacatgtaccattttgtttaattatcattgccaagaaaagtacatttccaatccattcaatatcacaattgaataattcactatttgctgtcactttgagtgcttttaggtattgtgtaagtcttttttctgattctacagtgctgtctagactcaatgcacaaaatttcattatattattcaagattcccaaaaaatgtttatgacttattactgaggatttactgaaatcatcaatatgtttaataccagtgctagcgccttgatatatacttaacatcaatccatcatccatccaatcatttcttaaatagttagttaatagagggattccaccgaaacttaaaaaatctgaatatgttttagaattggaattaatcaatctaatcatcaatttgagcccttgctcctttattttcaaactaccttgtaatgtagaaaacaaaaatttaaagttaagatatcgtagtagttttgcattttcctttatcaattttgaaacaaggtcaagtaacatggcacattcatcatcacaatcggatgcattaatcatatacacaatggttgttagcaaggatttaaaagtctccggagatgaatcagaacgtactaatatccataaaatattatcaacattcaagagaatatctttaccaattaaacttcgcttcagtgctaataagattcgttttaagatcttcatatcggacatgtaaaccaaatttacctctttatatttggtatcttgaataaaaattatcaattgaaataccatgaattttcttatttcatttatacaatctttccaaatatggaaatcaaaaataagcattctgaatgctagcttgtttttaaggaatgattcatcagaattaagagtattataacccacaaagttcaatattaaattaaccaattcgaatgtaaacatgcggtttttttcccttaaaataatacctaaaatataataacccccatcagcaacaaattcttgttcaatttcactgcttgtttctaagatgtatagtaaaaatgataaattatgaaacaaatcattttcgttttccgacttttcaagagtgtgaagacagtaagtataaccatatatacaactaaaagattcaagcatcgatattccttgtttccacttcaggcctgaaacatcggtattaaatgaaataagatcactattttcattagtacttttatatgtacccttgttttcggaattccaaactaacttaacattttgtttacttagtatcttatcaatattttcaacatgcttaaatttaccatatacatttataatcaaggaactatactgtgacgatgttaacaatgatgttggtttggatagttcaaaatatttctttatattttcaccaagcaaatgtatataaaatatccaaagtttccaatctcttgtttcaaccattaacacatctgaaatttcaattactataggagattttttttcttggtttgaaatagtcaaattgtataagttatgtacttctttatcatttttgaacgacaaaagaagcttttttgtgaatgacgatgataacttgttgccatcagtgaacaaacacttaaataccttcgattcaatgaaaatcccattaacatatagatcgatttttgatattcgtgaggattcattaatatgtaagaatgatatgttatacttctcttcagtatcaaaactataagatctaaacgaatgtttctctgtcgatgtttgtatttccaatatcccatcatttatgccataaacaatattagttggccctgataacacaaaaagttcactgtttatcttttctgagtctgaaaaattataaatttgactaaaccgaaccatcaatgataatacaaaagagttgcttgctggattgatattgatattcttgaactgaagttttttgtcttgtacaatcagagaattgagcatcaattgatcagacctaaacatatcttgatataaatcatacaatatagtgcttttgcttaaatttttgttcaaaactcttaactgagatggtgtgaaaccaaattctgacatatccaataataagagacgcaatattgtacatattatcttacattgacaaggatcttgcaatccaaatttcagcaatagatcaattatatttttggtattaaaaatgattctattcatcaatgaagctttaacagtttgataaattactaacattaatgattgataaaattgatgatcctcagaatgattatcatgttgtagtattccagttaaaataacttcaatttttccactagtcgattcatcatcggtgaaaagagcaattaaataatttccaaattgccaaacatttatctcactgtcaatcatgtatttacattcatattcaaacaaataatcatatctattatcgcccttgtgtggcgtttgaggtaactccggaaatttgttccagttggttatcattagcatgaaatcatcagtcgccaaacgtttcccatcaaaccggacaacatctaaaaatgaatccaccaagatacttttctgcagagtatcctcttccataacaattgttttatcaacaaatatataagttgtgattccttgacctttaacaacaatatttagtggaattaaatgaaattgttaaattttttcccctttaagaagaggccgcatttgcaatttcgaggaagggaaaaatatttcgtttcccatgagaagagatggatgaactttcatgttatattgattttgatttttgctttgtttttgctcaactatattacagagtcctataagggaaaaagcttatattatacacacatacgatcgtattagattagtaaacaagacacgcttatagaatatgacggaatcatttgagagtgctggtcacaactctgaagggaatggactcaatgcagatcgtccactccacgttcaacgtcattcacacgatcgtctacaactggagaacagatccctatcgaatagaattgattcaccatctctaaaatgctcagatggtaatgttgtagatgagaatcaatttaaaatgagcagtaagcaacacatgctgataacagagtcaaatactaatactccgctgctaacatctgagacgaataccgaatatgaaaatataactgatattgaagatttatctaatattaaccagctagcagatgtaagtaatgatagtacatatgaaaacaatattgagaatgaaaatgaagatcaaacaggtggtaataatgcacatgaggaaaacacagcagttaacaattcttctactgtcaataccgcttccgatgatcatctacctctacaaatatcagactatcaacgtcttacttacattagacaagaatattcaaatatccaatcacaatcaaaactttactactacatcgataaaaattggttggagttatttcttaatggaaattttgatcaatcctcattcaatctagaaactaatataggtccagtgattactttgacaaatgggttactactggaagacattgaccctaaacaatatgagtttataccgcaagaacaaatgaagcatcttgtaactacttttagacttggtcaagatcaactaattatagaaagagatatggtttttccaccatataaaaaaccattcattgaattatatccattctccatcgtgccgcatatttttattagtaatgcaagtcatgttaacagatattctcagttgaatgataataataagtctcaacatgaattgagagtttctcctcaaaattccgtttctgatttgattgaaatgtttttgagtactttcaatctaatgaatattaagactaaagatttaagattatgggtaatagaatttaattctatgaatacaccaactgttataataccatcatctttgaaagatatcaaagaaaaaacattgataaatacaaacaaggcatcgaagacaatactagcaaaaaggaacattaaaccatgccacattatgttagaaattagacaatttgatgatttgttttatcttgagataagctcacacatattaccaggaaatggtcttgtaggcctttctaatctaggaaatacttgttatatgaattctgcattacaatgtttactgcatataccagaattgaattattattttctatatcagtttttcgagaaagaattaaatgttgataatccgctaggaaacaacggtaaagttgcaaccagttttgccaatttaatcaagcaaacatttgacaatagatattcaggaaataatggtcacttttctccaagagagttcaaatacaccattggtcattttaattcattatttgctgattatcatcaacaagactcacaagagtttattgcgtatttattagatggtttacatgaagacttgaatagagttttgaaaaaaccatacgtggagaaaccagagttagcagaaggtgaagagaacagtgaaaaagccattcaagaattagctcaaaaatgttgggattctcataaacttagaaatgattcagttattgttgatttgtttgttgcattatacaaatcaactgttatatgtccaacatgtaatggtgtcagtataacatttgacccttacaatgatttgacattaccattacctgttaaagctaagtggtctcataaaataaaagttttatcagatgttggccatcctataacattggaaattcaattagaaaaaagctcaatgtatttagatttgaaattagcagttggtaaatacatgaatatccccaaggaggaattaattggtgttgaattatttagaaattctgtttacaaaaattttgaagatagtaattctgattctagatatttaccagtttctgaattaatcagtcaaaatgatgacatttggttttatcaagtcaagcatggcccggaagatcatgtcatacctgtaatttctacagtttcctcacatattttcggtattccatttttcataagcttgactgaaaaagaactatactcatatggtaccattaagaaaaagatgtttgtcaaatatagccaattatctacatcttcagttttcaaagaaatgtctagtatatcacatggcgatcataaagctgaagatttcacaaaagcggaagaaataattaaatctcctcaattgaatttacccgatggtttgaaatcattagtttcttttggttcagagattgtagatggtaatgatgataacgacaatgaatctattatatcttttgctgacccagaaaataatttagaaaatacgtttgcatcaaaatactgcacttcatcaatggtcgtggaattgtccaatatgtttaatagatcaaacagaggtaaatctctgtcgaatacttcccaattattttggtttccagaaaatacacacagtgttctgaacaaaactttaccattactgacaaaaaatcttaatgatttgaaaaaggtattttatttttacacttcagaaatggtggaagaatatcaaaaagctgttgaaatagataatgttaacaaggaagaagaaaatgaaaaattcaatgaagaaatcaaagaagatagtgacaagaatgaagaaatgttggataatataagctccaactccggtgtttcagatatattatccgaagagtctacagaccacttaaacaatattagtaaagaagaaactgattgcgaagttatgtcaacttcgaatgagaaagataatgaagttatagataaattaggtgagaattccaattctgcaagcttttattctgcacaagatgattttaggaataacttacaatcaagggatgttgctttaaaagattcagattcagaatccatattatcatctattcatattactgatgacgttgctgattattccccaaagccaattattgaaccaatgtctgtgattgtgaatactttcactgatgacaaatttaacttatatttctgtgatttatctgaagaagcccaaaatggttccgaaacatggtcaaaacctgaagtacttgtaaatgaagaattagaaattgaaagaagaaagaatgctgaagatttaaagaaacctgtgacagtttatgattgtttagaactcttttccaaacctgaagtattaggtcaaaatgatttatggtactgtccaaagtgtaaagatcatagacaagctactaaaaaaattgaaatttggtcagctcctgatattttaacaattcatttgaagagatttgaaagtaccagaagtttcagtgataaaattgatattgttattgatttccctattgaaggtttagatctcacctaaatatgttagtgataaagatggtgagaacatttatgatttgtttgcggtggataatcattttggtggactaggcggtggccattatacgtcatacgtaaaaaattttgttgataataattggtattattttcgatgattctagagtctctagagttgctgatccaagagattcaattaagggtagcgcatatttattattctatcgtaaaagaagtgataaatttttaggtggtgaattttttgaaagtatttcaaaggaagtcaaaagacaaagggatgaacttgaaagtacaattttaaaacatagacttgaatcacaaacttcattgtcatcatcttcatcatcaccttcacctgctaatacagtggatgatatgtcatgttcaccagatagaattgaaaatggagatgtggaagatattgaaatatcagaagacttaactgaaattggagatggtaacaaaagacgcaagataaatagcgagacagatacggaaacattatctgagactaaaagtattgatgttgaactgaatgaagaaactgaggaagagaagtagtgttttctaaatattttattttcaagttttgctatacattttcaaataatgtttttatatgagtgtttattactatgtaaattagtgtttattgtctgttatatattatagaatctgaaagtaaatattgtactgtagatttgataactgtacaagaaagctgcatgctgttaattgttaaagacccggtttcgcattttagagtggtaacgatttttttttcatgtctttatgaatttaaaatttttatcatcaaaaagatcaacctacttctttaactttcagttctgaacaaacaaataacatgtcagaaattgatggtcacattcaactcaaatcaacgattttttcgccatcagaattagcacagattgcacctgatgttacattaaataaatatattaatgccggatatcgtccatcattacgtcgattcaatgaatttaaaccagtaattatatcaaaggcaggtatatcaagatatgacacatctattaatgggaaagcagaagagatgaacgaatctacaagtgttattggatcatcatcagttaaatgtggtgaaacatcagcaatttgtatgattagtgcaggtattattgaagatgattttgaagcagtcaatgattatagaacaagacttgatgctgatattattgttgataatgataaagaagaaattgagaatgtattaggaggtgaactgttaagtgaaaatggatgtgtttatccagttgttgaaatcgctaaaggatcaacgggtccaccaggcgatgaagaagttgaattaggtgaaaaactttttgaaactgtattacattcaggattaataaatagagatgaattaaagattgatattggattaaagagtattgatgaaaatggagatgaagtaattttaaagggtgaagaagcaaatattcaaaagaaatttagttttgtattgtatgctagaattcaagttttcggtagaacaggtccattatttgatcaatgttatgcagcattaattaaagctttaaaagatacaaaattaccggatgtatacttaaatgaaagagaaagtagtttaagaactagaacaggtaaaagaaatgctaatgtaaatattcaaacatatgatttagtttgtgatcaagttaaatttagggaattaaaattaagaaatgatagaatatgttgggcaagtacattaggtattgtcaatgttgaagaggaaagtcatgatgaagaaggtgatgctgaaatgtctgaatctaatcatattggaaaaactataatattgagtgatttagaaggtgaagcagaagataatataatgaaaagaataactgcattaagtaatggtaatgatgaatttgctagtattacaattgaaagaggtacaggagaaagactaactaaagatgttattaagaaagcattaaaattatcacaagtaagagctagtgatatgatcaaaaaattatagataaatgaaatgaagttgtatgtgagaatatttcaagaaaagcaggattttattttagtataataataaatgttaaataatagttatacatatttttttatacaaacaaaaggtatactttttttccataaatttttataatttttataattttttttttcagatgtacaatagaaacacatatatataaagtaaagtaaagtatagcaagataaatgttaaacgaatggaggtatcaacgaatgtttactaatcattataattttctttcacttcttgcacttttttcattcttaacacgtcttctagttgttggaattggggaaccagtatttgaatcataattttgttgtaaagtttgtttatctaataagacatattcattaactttagcagcaacaccacctctaactcttttaacaactttagatttctttgatttctttctgtaaacttcgatatagaaagcaatgaataagactaaataagaagaaataattgcacaacctgaaatagttgcaagtggagtaccagaacaagttaaattatttgtgaattttggattaatatttgacataactttaatatagacagcaaaatagataaaactcaaatcaattaaaaattgaataatttgaaatctagtaacccattctttccaccaaactctaatacctcttgcagctaagaaataataccaatacataacaacatgaacaaataaattgagtgagattggaacccaagaaattggagttgtacccataagttgagtataacataacatagcagttgcaccatgatgataagtatgtaagaaagttaatttcttttgttttaaaacaaggaaaacagtatcaataaattcaacatattttgttaagtaatttaagtaatagagaacaaccattttttgagtccaagcattttcattacaaattgcataaaataaaccattataataaatttgagggataagttgttcaactaatgataggaataatattaatgataaagttgttaaaaataaattatgtaattgaaataaaccatttaaaacgaatggtttaacattgaattttttcattaaagcattaccaccaaagataacagtataatagacaataactgccgggaatacagtataaggacttgataaaaatgtaacaccaggtacaaaattgaattcagacatgatgaatttcccatgtgacaaaaatttgaaaagtgattcgacataagggaaaagttctattccgaagggatgatcaatagaaggaagcggaactgcagacatgtttagaaaagctttcttgtcttaaaagaagagaagcaaaagagaagaaatgagttaaggaaagaagagaaaaaaagataaagaaaagcaacagatataatcaaataaactaaatatcagttctgtcgtatagaaatctatgaaaaacttcaacattcaacattcatgtcaacagtacagaatagtctttaatagtaaacacgagaaaaagaaattaaaaaaagaaaaagaaaaagaaaagcgcgtttcctatgttttcatcacaatgacgtaagcggggcttatcttatttagtcccatcgattataattgtacaattccaacctttaatgcctggtcttaacttgacaaaggtttaaattaatcaatgcatagtctgtctttggaagcacaatcacgtccaagaactactagtacagcatccgtagtcacaggtgaagccttggatctgatatccgattcaccatcatctcttgtttggcgtcttacatttactgcctctatcttaggtttcctatttggttatgatacaggttatatttcatcagttttagtttcaattggttctgatttaggtaatgctccattaactataaagcaaagtgaatatatatcatctgcaacttcatttggtgccttaattacatcatttttagcaggtttattagttgatttaattggcaggaaatatactgtaataatttgtgatttattattcataattggtgtttcccttcaatttactgctcattcagtatttcaaatgataattggaagattaataatggggtttggtattgggattggatcattagctgctccattatatatttcagaattatcaccagggaaattccgtggtagattagttacaatgaattgtttagcaattactggtggtcaattaattgcttattcaataggtgctataatgagtaattggcataatggctggagatatattgtacttatttctttaattccttgtttaattcaattatggttgattttttcattacctgatactccaagatatcttataatgcaacaaagatatgatgatgcttttaaagttttgaagaaaatatatccattagcatctgattctttattaaatgctaatattgatgagcttcaacttatgaataaagtttggttagatgatgataccctgatttacaaaattaaatcaacttttaatgaattactttaaaataccttcaaatagaagatctttaattattgcttgtagtttacaggcaactcaacaatttattggatttaatgcattgatgtatttttcatcatcaattttccaaatggtaggattccaacattcaacttttgtaagttgctttattgcaggaactaatttcttagtaaccattttggcaatatttattattgattctgttggaaggaggaaaatgttattatattcaatgccagcattatgtttatcacaaatagtttgtgcaatatcattcaattctttaaatagttccaatgaagatatttggaaatacatcttattaatcagtttgatgtcatttgttgcattttactcaattggtttaggtaatataccttggcaacaaagtgaacttttcactcaaaaattacgtggtgttggatcatcattatcaactgcaactaactggtttggctcaatgataatctcattttgtttcttatcattaatggaatcaatttctccatctttaacattcttagtttttgcttttaatacattaatatcattcatttttatttatttcacatacccagaacttacaggattacaattagaacaagttcaagatcttttaaaggatggttttaatgttgctgagagcatggctatatatgatgaatatagacaaattcattaactaccttctcattcttcccttttgtaattatagaattcaaagtgtttattttagtaatacattattatagaattataaaaataaattagttttgtaaaagcgttagtaaatgtatataattagcagttgattaccgtggtattatgtttgataaatcaacatcttgaaaatggttatattttttcttaggaaaacttgaaggtgatgattgaatactattattaaccctataattattcatcaccgcagagtgacccattctaggtgagacattaggtggattagtattcatattattgttattattgttataccgttgagattcataaggatacggtggattattacgttgttgttgctgtggtatttgctgatgttgttgataagtgtttggttgtccaaggtatccatttggattatgatttggatgtgaatttggatatagcatattataagtcctatttttcagagttggtgatttaagatattgtattttttgatttggtgggatcatactatcatttggtggataattattataatatggtctatttggattcattggattatgatggaagtgtgattgctctgtaatatttttatgggaattatgatatggatcaaaatgatgatatttttgctgttgttgttgttgttgttgttgctgttgttgagggtgtggatgagcataataataatcaggttgaattggataaggtttagtaacgtttggtgtattaaggaaagatgatgaagcaggaggagtgagttcattatagtgactactcacattagggtgaataacacgtctttgatctactggatttggaggtaatggtttatttggagcaggagaatgtttcacactaagcttacgctgaattggaacagatgcagatctcattaatgtggaattatcatcatcaattcgattttgtttattattgatattattatgtgtaacagctgatcgagtatgtgtatgacttacttttctatcgatgttgtaattatgattatgattgtgattatcattgaaattgaaaactaaattatcatctggcttattagctaaaaggaattcattagtattatcatatccataagaagtatttgatacatttgatgctgaatgcttatgataatttttttttggtgttgataaaaatgattgttgaggagtaacatcatgtaaagtcttaggtgatccaacaggagtaatattgaatgtatttttagttggtgtatgtggtacaaagctgtgtattgtagaattggatattgacgaattcttagaatgagttactcctcgaatattattcagttccattgattttattttgataatcattatcatcaataagatgtttttcactatgattatctttatgaaaataataatcatcaagtatttcattctcatcttctgtattactatctaatgatgaactatcatcagtatcttgaattaaagaatctaaatgtattgatttgatatcagcacgattggcaaactcttgaagcattttgttcaacctgtattaatagttttacctaattccaaagcttttttagcagctgatttttcatgattctgtcgtcttgtacttccaagcacagatttcaaagttttaaattttgatgacggtattgaagtattgcttgtattcattgaattatttgatacaaaacttaaatctgaatcaacaaagtttgtattatcaaattcagaattttgagagtcatcccattcttcatctgccagttttaatttatctaataatctaccagttgttgttattgtatcagtggaatacgaactgattaaactatttcttttcggatcattttgatcattattattttctgtattacctttattcttttcagactgtttcttcttttgtttgagtgtctttctttccaattttacaaggggagaaacgactgcaaattttttagccatagaatttgatgttatgtaattcaagataatgaactcaaggtgttgggttgatgtaaaaagatatcaagttatgaaattgtgaaattagacagttaaaagggataatacaaagtgagaggaaatctttattgccgttgttataatatatcaaaataagcaaagtatgcaggtcaaaaagagataaacgaagctttggtataatattaatcttacaatattttaaatcaaggggttcctctgacacgtaaacaaagaaatttttaaaaatagcaaaaacgataatattgcatgcaatttatttttttcgattttttgtttaatttaatgtatatggttttataaagagaattaattatgtttatatagtatctaactagtggtaggttatttcaaaagttatctgatggtaatggtctcttctccggtaaaacaattctaccacgagattccatggttctcatttgaataacttctaaaagatcgtgaaaggattgttaaaactggtgcatcaacacctttctcctgtgcgatatctaatgcagttccaacaattgtcttatattcagtatattgattttttctaatatctataagcattgaaggtggataatattcaccatcatcggatctaatcataaaatccattatatcttcaggtaattcaactccatcagccttagcaattgcaataacttccttcattgcaggtcttgaaattttatccataccaccaaataattctaatctacctgaatcaacatttgttattgcacaaactgtattaattgcaccattataaactaattttctccatctagtatatttaacatcttcattatattgtgctttattcttttcattataatataattcaacaaattttttagcttttgaaatttgtaaatctttatcaattgatgaattaataaatggtccaaatgaaacagtatctggtccaacatgcttaacagttctaccatataatgtactactaatcatagtaacaccagagataacagttgcatcagggaatgctttaaatacagatctttcaataccaataccattttctaataaaacaattgcagtatctttattatatgctttttcaaacattttttcaactggtgaaacatcaggaatattctttgttgtaacaactatgtaatcgaaaacaccaactttagaaatggcttcctctgcattcttaaatacatgatctggtttaaaagatggaattgaaccataatcacaagattcaattgagaatccatcatttgataaaacatcatattgagatctagcaactacactaacttcacaaccatttttttgtaaagtataagcagcaatagaaccaacaccaccaacaccaattaataaaattttacttgccattatttctttatttccttatttctttatatatcaattatttactaaacgaagtaattctttatacctctattaaatatacttccccagagttatcaactggtctttatataggaaaattggaaaaataaatatgcagttatcggaataatatttcgcgtctctttcctttttgaggaattggcgcctatagtagctagttatacaaatacacagtatttcatcagtatttaaattgaatttgataattctcttcaggtgttggtctcttttctggtagttcaaaacgacccttagcttcacccgtacgtaattgaactaattttaacaaattatctaaaactgttaaagttggaattggcaccccattacgttttgcatatttcacaacattactaataatgacagtattttcaatataattaccatttctaacatcaatcaacattgaaggtggataatagacaccatcttcacctctaatcatttcatcaataacataatcttcgatttctacaccttcacttttagcaactgcaacaacttctttcattgcaggtctaacaacactctccataccaccaaataaatccattcttccaaaatctaaattagttaatgcacatgttgtattaatacatgtattataaactaatttcctccatcttgttaatttaacattttcctcatattctgcaaaattattatcatttgaatataaactcaggaaatgtttacatctatcatattgcatttgtttatctaaattataattaataaatgcaccaaatttaattatatctcttgcaatatgtttaacagtatcttcatataatgtggtaccaattaatgaaacaccagataaaataattgcctttggatattttctataaattggaatctcaattccaataccattttcaataagtacaattgtactcgattcatgataacaatcttctaagaaatcaacaactggtgaaatttcaggtatattttttgttgtaataataatgtaatcaaatggtccatatttttcataaccttctttggtagatttaacaacatttgttgcaatataattatcaattataccataactacatgattcaattctatatcctgattttatactatcataagtttcaggtcttgaaacaacagtaacttccgctctacctaaatgttcaagcgtatatgaaacaatggtaccaacaccaccaaatccaattagcaaaatttgcggttttctttctgacatgtctttttattgtttatttgattctttattctatggaaagaaataataatttaaatgatagaataaattaataaactaaatatattttaaattaaatagggaatggtcccccattaaatatcagaaaaaaatggaataagttgattaaagtttttaaaactttaatcaattaaattacaatagacacggcaatttatcacaaaacattctccctttccaacattttatgacaatcaactacaaatttcataaaagtaatcattatcaaaacaatctaatactatttgttatacaggttatatatctccgaagcataaaaactacccgttaataccccaatttaacatgaaaaattatatccagggtaagatcttataaaaaaattgtctcggctttatatcacctatcactacttcaataagagtattatacctttacactaacaacttccccacacttttctttacatagtaacagtttagtcatcagttggaaataggtatctccaatagaacagttaccaactgatactttcaataatacacactaacaacgtttacattcccggtagtattattcacatatatatcaactgatgatagagtggctcccccgaataaccgataaaggactccgagtgcgaagtgttgtgtcaaaattttggttatttataaggtaaaaagaacagccattattggacagtgaatgtatttcgatattgtttgaatattaggatgtctaactatatatgagcgtttattatactggttataaaaaatacttaattaaagtagtttactgtcaatgttttgagtatttccagatgatgctaatgatgaagatgtttgatatgttgttgtagaatttgcagatccacccattaatgacaatgttaaaatcataactaataaatgtaaactcaaacaatatgcaacaaataaccatcttgtaagtggtgtacttaaaacagttttagtaacttgaatgaatattctatcccatggtgtaattttagaattaattctcttagtttccattaatctaaattgttcaattggatgaagatcatgttcataatccaccttatatctactttcaatatctcctccattttgttgaatattttgtgcattttgatgatattgtaaaaaccttatcttttcatataattcacgattatcattcttaagtgaattaatctctctctttaattcaacaattttactaaaatgtttcttattttcttcttcaagttctttatttctatttctgaatctatccctttgttgtgtaattattggtagtagagatgagtcactggaatttcctccacctcccattataatagatctattatcatcagttccaccagcaattgaggcagctggtgatatatttctattattattgttatttttaccattatttgttccagcaattgaagaaatcattgacatcgtctcccatttatcatcattattattaccagtatgttcaaaattaattaaatcattctctaatctaacatttgtatcctttaatacacgaatttctttttcaagttgttcaatctttgctgaaaaatcttcaatttttttagatgattcctcattaactctacgtaattgaattaagtcattattaagtttcttatttctctgtacaattgcagattcaatctttgcaacactatctgtttcaaattcattatttgtatcagaattatctgattcatccccaaattgtatttgtttcaataattctaattctttttttatttcttcataatcacttctttcatttttaattttctttaaattgtcaatatcagtatttaattgtgtaatttctttattgaatttatcatttattaatttaatttcatcattcaatttagttgatgtttttctttcatgactcagttttgcaacaagcatggaattttcactctctaaattactaatttgtttatcattttcctttttggtctttttaacctcaatatcaattttagagttcaataaacttgcattctttcttaattcttcatttctactttgtaatgattgaactctttctttggaagattctaaatctttctttaatgattcaactaaactattattcacattatcagttccaaaatcattctttgcaactacattatcttcttccgcatcttcattgtattcttcacctaatgcttctgatttctttttaagtcttaactttaacattttttcattaacttcacgatcttgaatatccttacgtaacgattcaattacggattctaattcctcttcattcttcttccaattgctttctctttcttcaagtaatgatttccactcactatctttagcttcaagttcagcatcgttgattgttttcatttgggtttcagttgtttgaatttgttcttttaatttatcataatctgcaaattttaatagtttctcctctaatattttattctcttctttaactttagttaattcagaaactgtagctaatgtgtctaaactcgattttaatagtggttttggatcaggcgcctcagcaattgatctataaactttgaaaaataaattctcaatatttttagttttcttattcattgaatcaataacattttgatatgatttaagtaatgtattaaacttctctaacttctcttcatcttcaagcttcttaaaacttttggtttgattggccaattctttacgatcaactaatgattccttttgataatcttgaatatcaatagccttttcatccaattctttttgtaaattagataaatcaatgattgtccactgagtgcaatgctttctcaaggacaacactactatctaccattttagaattaacttcagtcatattgatttgattgattttgagagagcaacaaaggattaaatagtaaaaataatcaacaaaatgcgttttcattcaacacatcaattcaaaaacttaacaagtttcgcttttagtcaatgattgctcctgaattaatataaataataattctatatttttgattctacaatgccaagtgtagtgataattggtggtccgtcaggaaccgggaaatctacaattgctaataggttaactgaaaggttttcgaataatagggtatgttttattgaaggtgatgaattacatagtgtggaaaatatacaaaaaatgagtaataatataccattaaatgatgaagatagatggccctggttattaaaaatttcaacctatgccaatgagcaaataactgaaggttatgaattaatcgtggtgacttgttcaatgctcaaaaaatcatacagagattttttgaaggaacatataaattgcaatgaattgtcattaattatattgttcaatgattataatactatcttgaagcatatggtagcaagaaagggtcacttcttcaaagaaactatgttgaagtcacaattcgattgtttagaactaccaaaagatgaaatcgatgtttctgtaattcaatgcggtagtcactctcccgatgaaatagttgatgatataatatcagtttcttctctttgcattttcaaatccaatatttgaagaattattcataaacgatgcaaaatttcttttctgtgaactagttagatcattcactattaatgttcatattcatacccatattcaaatttggctgtatattgtttaaatttgttttccttttattagaataaatattgttattactattattattgttattatttacaggacctaatatatcattatcacccttatgtattcttcttcttggatatttcatagtagagtttgcaaatatatttgaaacaggtaatggatcttgtttaaaccattcatgactcattgaatctaatgaatttatccttacatttggatcataaatcaacagcttagataagaaatctaaacaatcttcatcaacaccaccattatttgtataccaagcctttaaattagacggaaacatagtaaatctctgcaattgatgatattcaggatatttattcaatgtaggccattcattgactgttggagttcccaaaatttgcattattttcaatagttgattttcttgaaatggcatatgttttttattatccatttttgtctcttcacctttaaataatggtcttaatgataataattcagctaagatacaaccaactgcccacaaatcaactgcaggtgtataatgccttgcacctaataataattcaggtgctctataccaaattgtaacaacaactttatcaccagtataaagagtttgtaattgattattaaatcgtctagctaaacctaaatcaccaattttaatgactccattttgagtaaccataatattagcaggttttaaatcacgatgtaaaacccaattttcatgtagaaatgttaaaccttgtaaaatttggaacattatacttttcaatgataatttattgattggttttatttcaggatgtgaatgataatgaataatttgtaaaagatcatattctgcaaattcaaaaaccatgtaaattgatttattctcaagtatgatctctttcaacgttgaaatattttgatgatttatctctttgcacaaagacatttcacgaattgcactctgtgaaatacctgtataatgcagtacttgagtatccttagagtcagatttaaactttttaattgcatatagttgatttaagttagcatgttgtttacctacagctttataaaccttaccataggtacctgctgcaatataacccagaacgtcgtatttctcaattatactcactctacttgcatctttcctttgtcgataaggctccaacgagaaaaagttattgggtgccattcgccctggttgttgactattccaatactgttgagtagacattgatctctgtttgaaagaaagaacatataacgtgagctaaactgattcatgcttaaatcatgcactgattaaagtagattactagccacatatttcaaatattttgcggctgatgcaattatacattatacttattgcattaagaacagtataatatagtttttgttttgtcatattaaatattatttacatgagttatacacaatcattcaacaggaatcttagtctttggagctttgaatctattaaatgaatttttaagtgctctagatattgatctaatgacaaattgatcaaagaaaggagctaacataattgcacttaaccaaataagtggacctaaaactcttatagttgcatatgcataagcacctgacatttcagcacgatgtttatcaccctgttcactatcccaattaaccaatccattatgcattaattcaatacctttagtaactatattttcaggtaacattggaggtttaatttcatattgatcaaataagtaccacaataaaagaaaaggtataattgaaagaaactgttgtaaaatagctatactaataatgaatggtgcaggtcttaataatattgatctcatatatggtttaagtaacaatggtgtcttttgataatatttattatttgctaatgttttaattttagcaatatcttcaatatcagatgctgtacgtgcatctttaaggacttttctctcttcctccatctctactggtgctttctttaatttagcagatcttttgtatataagggaaagggttggtgatgtagaaaatgaacgtaatcctggaaatgtagtgaatttttgagtagcatgaatattggatttaaatcctatactggatcttagtattgattgctttaccagtatacgaaacattgtggtatatatagttcttgaaacaaagatttaaggaaaaaacttgtcttacacaaaaaaaatcgtaaaaatcatgattacttgaaattttagttatgtgtggtcgctgtactttgaagaacatataactagtttgaactggacttcattcacaccagttagaggacatacatttcatcatactttgaattcagtcttatattcctttctgtatggattaacctcagtctcttcacttctgttcaatgcgacccattttggttcatctttaaataaacgtaatgccttaacatattttttatcagttaacgtaaaacgatggtaaattcctgctggaagaataagcatatcacctacctctacacgagctctaatccatctatcattaccatcacgcacatcgaaatatccttcaccgtcaaggatatatctaatttcttcatcttcatgaatatgttctgtgaagaatatatctaatttttcattaagtgcagattcaccaccagggaatgaagcactatcaagtgtaatataatctctatttttgtaatgacgttcaactgcaagatcttcaactttttcaggtgtaagatgatcataaaaaacacctaatgaacggagttcctcggctctaaccgctttacctgaatcatgaggtgcagtcattggggttgaatcttcttcgtagtagtatattgcaaccatttgccttgtgtatagtgaatggtaaagaatggagaagtgatgaatgagtctcttttattctagttattgattttattatttattatgttacaaatccacgtgtagaaacagtggctcaaaagaatgcttacttaatcactttttatatagtctttcacaaggttgatctacagccaatcaatagtctttttaatcaaattgatcagatttaatcactttgatcgaatgtcttaccatatataagagcatcatcaagttcatccattcccttaagtcttgcacattgtggcacacgtccaataactgtaaatcctaatctatcccacagtttacgacttgcaatattacttgcataaactaaattgaagacacttgatttataacctaattttggtgcccatttaacatattgttgtgccattattttacccactccacgacctcttgctgatgtcattactaaaaatccaccattacagatatgtgatgatctacctgcataatttggtttaatatagaaacttcccattacatcttctcccttaacatccttaggatcagttacatcaccgagtacagcaacgccaataaaatatttacagtaataatcttcgaattctttcgtatttaaaggatcttcaaaagaataagtagtaccctcctcaatgatcacattcattaattcatgcagtgcattaaagacactctctggcatttcatctttactattatatggaactagtgacactagagccccgtccgagagattacctttttcaatcttattgatttgcattacccttttaagaaaagagattcactttatgctaaatcgattgtggtagttaaatttcaacttttcacgtaataaaactgaaaattatgtaatttactcacatgcaccactactcggactcaagaactagaggcgctcccgataacagcgtaattacctatttgggaaaacaaacccgttatcttttcattattaatattgaaatttactacaacattaaaatcctttataaattataaacattaacctatgtgtgttcacaaagatatcatcaagagccatactatagagagatactctccccctttctaataagtaatgacacagtttgatccctctattcatttgataccatatactgactcaacatctaaattagagagatcaataaatcaattaccattattttcaagtaaatgcaaatcatatcttgaacttcatagtgataaaattatacccatatttacattgaaatgtatagaagttatagaaaatgaacttataaattataaacaagagaacccctgtgtttctacatctccatcatttgaatctgcattaagtttattaccatttacatttgatgcatttaacacacccttcaacattatcattgattagtaaatatctcggattttcaatttctccaataatgcattatgaatttgttcattttagtaaaacaaaaaatccaataataattcacgaaaaatcagttgcatacccatttatttgtataattcaattaccaaaagttcaaaagcatttttcatatataccaccaggacatttattcatattaaagggtagagtaattgaaaacatatcatttaaattttccaagagtaccaatgaaaataacaattatatggtattatgtccattctatacaccagataatcaagtaaattatgaggacaaagaatcaaaagtgaacactaatagatacattgaaaataaatcatcaataataaatgatgattcattacactactttaaaccattatacttcatggttaaacaattattataccgtttaagtccaaaatacaataaaaaaaagtaaataattgattttaaattattttgcactggttgatactttattagtattattagtattaatatttacccttatattatattttttagtagtatttataataacttcatcaaaccatttaattcttattagcatttctaaattataaaacggactcttcataacataatctgagtataatctataaatttcattttgtaatgatgaaatttcactttcaattgtatcacttgatgttattaaaataattttcaatcctgtaacagtttgatgtaagaaaatattaaaagtatcagttttaatacatcttaaaccagttttattagaattcatattaataccacttttattggaattagtttcttcctttgttggtaaatttggtttgaatttggatgcaattgcatgcataccatgtaaatttgatgcaataactaaataatcatttgaattttgttcagtaattggagatccaacagaatctatatctctttggtataataatgaacctgatctagatatcagatatagtgaatatatttgcatttttgttaataattgaagtttatgattgtatattattcaagaggcttagaaacattgatcttgaccctcagctgtggtgaatctttgttaattttaaggattagaatggtgaaagaaaattcaacatcattaaagcaggggacgatgcgtcgaaggtgtaacagttcaaggcttattctactatatagtggtttatccgtaaccttatatattcttatatctatatatgatgtaagagaaggagaacaattactagttctagaactgtaagtgcacatgtgtgtatcctgatagatattactcttgtgataccagcatatagctgatatagtttataagatatactattaaaccagtctgtaaaatcacttctattaaggggagatatcggaaatatcgatattctcggaaagaaaccaaacgagtgattacaaattttcagacccttactgattgatgtagtctaagttattcatcttataaatataagccttcattcccattaataacttagtagttaagtgtttcaagtagaattaattaatacagaataaattgttggttctattaaacaaatcaaatgttatccgttgcaccaaagtcaaatgtattattaaatccaagaatgaaaactataacgccaattcaatcagatattaatgataaacctataaagaaaattgttatgtcaaaggaatgggttttaccaccaagaccaaaacctggacgtaaaccatgtgaagatattccaagttctaagagaaaggcacaaaatcgtgcagctcaacgtgcatttagagaacgtagagctaatagagttagtgaattagaagagaaaataatgggtattgaaagagagagatcaattaatgatggtattttaaaggataagattaaaaatttacaaagagaaaatgaaattttaatgatggaaaataaaagaattaaaagtgaaaatgctagattattaacacaaatgaataatagtaaaaataatgagaatgataaaaaacaaaactcaatcacatttgattcattatttaacttagtaccacaagctgctgttccattaagaaaacgtaaatcaagtgaaaaaagtgtttccccaactgatgaaattgattttactaattcatttacagttaagaagcaaagaaaaatgccaatattaaatgatgttttcaaaagtaatagtaataataatagtaacttatctatatcatcaatgaactctttcagtaagaaaaatgaatcaatgataacattaaatagtttatcaagtttgagtcataataatagtagttcatccattgatacagcaaatattaataatataataataccaataccaccattaccaacacaactactataaataataataacaataataatataccatttgaaagttgtggattttgttcagatgatacaccatgtgtatgtagggaaattgaaactgaacatcaattatcacaacaaagggaaattcgtaaaatacaggaaaacaaaaaggcagataaggaaagagaacaagaggaaaatgagaagaaacagggaaagaaagaaatcattaatggatttagagattgagaaaaaggaaaaagaattaataatggaacttacaaagaatattaagaatgaagatttaagtcaaataattgaatgtaatggagatcccggcacttgtttacaatgtaagagtgatccattatcaacacaattctgtaaaacaattgcagaaaaatctaataatattaataaaggcacaaataaagatattagtactattcaattgccaagtatcgataagaatagtatactaaatagaaattcattaccatcattaactagtttaaaacttgatgaaccaggtaaaacgtttataccatgtgctgatgcttataagacaatatctaatcatttaagtatacgtaatgttggtattaataacatcacaaataatttacaaacccgaggtatgtttgttgaagtaggtagtgttgtgtcatgtttaagggaattagacagaaactttactaatagtaaataatgacataaaagatagtgcagtataaagattagagataaagaattttttttaattttatagaataagaatatttgtaataaagttgttaatcttttatcagaatatcatccacctaagaccaaaaaattcttggtttttaataactgtaaatacagtgattaattatacataatgtaactgaaactagttatttgtgctagagttttggcgattacttgaacttacatatatattgaggacttagtactgtctaatactacattcttacacatgtgctgttaaatggaaaagtgatgttaatccctcaactttgtaaaaatacatatagattactaaacggtatacaccgtacttgcccaaattgttacgatctcaaatgatttttattgtgatgagatgagatataagatgagatgagatgtggaatgaatataatagaaattgatattaactttaaaaaataagtagggtacggtggtaaatctacattgaaaagaacatgacatcacttactattctatgaataacaacaaacccttcctcgtattaaataataattaaagtttgtgtcgtataaaataaatatgcgacatttatgaaactaggggatataaccgaaatcttattctattcgataataatcactattatgagtgggatttaacttttttgaggaaaagttaccgcccaccttcccgtttgggaacttattatctccgttaagaaatctttggaaatgttacatggggtgatgcaatcaatgcgaagggaaacgtctcttgcatttactgggtaatttacttatattataataataataattaaaataaattaatattaactcttaaatgttttcattcatttaaatccatttattatctatactttcccgttttttttgaaagtcttaaattctaatttatattttatttaacttttatcacccttaatctcatctacatcctcatcatttgtttcagtttcaagttttttgcttccctttactctttctttattattttaaggctctaatctctaatcttctttttttacccttcttcaccacacccgatcttcattttctgcctctcctgcttctccaaaaaaaaaaaaaaaaagaaaaaataaaaatatatctattcctacttatttataatacatattcataatgggaagaacaaaactagaaaaaatatttccaacttataatggttacattgcaaattctaatgatgctttaattgtattacaagctgttttaaatggtgttttaaaacctgttaagtagaagaccaaatgagagtgaacgttctgaattaattaaatctggtaatgttttcgtatttatagaggaaacttccggtattaaacgttggactgatggtacaagttggtcaccatcgagaatacttgctagatttttaatttacagagaattatctaaaaattcatcttcaaattctgctacaaatctaaaacaaaaagattcgaaaaatccaagagattctaaaaattcaatttccaaaactcaattaagcgaaattgtaaattcaaacagtaacggagataaaaataataatactaataataataataacaataatgaaatcaataaattaaattcaagaactattacagctcatgcattggcaggaggtgatgcaattgttaatagtattaccaagaaaagatcaaggtcaaaatcaaatggttcgataagttcagacatttcaaatttttcttcaataccatcaccaaaatcttcaattacaaatattacaacatcaacaacaaatacatcaatatcatcatcttcttcatcaacattagatgataatatttatagatctgatggcttaattaaaaaatcaatgtcattatgtttattcccaaatactcaatttagaaaaactattcatttagtttcgtattatagagcaaatgatgttttaaataatttacttaataacccaacaaatgatcaattattgaaaaatgttgaattatcatttgaattattagaatctttaagaaatacaagtttaggtaatatgttatcaactagaggttcatcagaatcttttgaaagccatggattttgtgaaaatgatggatttgatgaaaaagttttaattaatttttcaaaacaatataatgaaaaatattcaataattagtaagagaagacaattaaattccctttatcaatatcaaccacaatatccacctcaacatcatcaatatcctttccaaaatcaatatcaaccacaatatcaattaccacctcatcaattaacacattcacaatctgatcatgaaataaattatcattcacactttgcaaattataatcatcatcatcatcattcttatgataattcagcaattcctattaaatatgaagataataaaattccactttataccttcaatgtcatatccattaccttcatacaataataaaattcccaataataatttaaataattttaatattaatttttcacataatccacaatcatataataataatattccatcatatattccaaattatgataataatttgtcaaataataatagttataattctaaaatgaattttcaaacatcaatttcattaactgattctaatctgaacagtaatatgaataataatgttagtaataacggttctaacagtgaaattctcaacaacgaaacaatttttaataataataataatagtaatagcaatattgataatacaaacgttgctaccacttctgctactactgatgctgttgttactactaccactgctgcttctactacggataataagaatgatagtatcattaatgatggagataaaaatgaagttactacaggtagtactaatttaagtaaaattccttcaattttttcacaaggaaataattctccaataatttatggatacaataacaatacaaatagtaacagtggtaaaattaatttacaaagtacaactccaataccaaaacaattatcaccaccaaataatttccataatagagtttcatcatcaaacgctacacaatttggatatccaccaactacacaatattcaccagtttcatatcaacaaccattatttgattatcaaacaattccaacacaattaccattacaaaccaattcaccaaattctaataatccattaattcaattagttagaacaccatttagtaataattcaagatctaataccccaaatacaattcaaaatttgaatccaaatcaaaatcaaagaatttattcattacaatatgttacttcaactacaccaatttcttataataataatatgattaataataatatgattaataataatatcatcaatatcaacaaattagatacaattaataaaagcaaaactccaatcagtgttaaaattgaaaatgatgatactcctgataagaataacaataatactagtaacgcgggtagcgctaataatttaaatgaagaaaatattagtgttaaaattgagagcgaatcaaatgtcgtgaatggaaatgagacttatagatcagtctattccagtgtataattctgtataaaaaaatagtaataaatcaataaataaattaatcttagtaaagtaaagtgcacgatgtcgatccttacataatgataagccgctataattattaataagtgtaaattttcgtctaatttccatacattataattgtgggatataaattatgggacttaatcattagtactaatttaatattcggatattacaattccccaaataggcaattagtgaggggagattaagcgaaattgtggaaggatcggcctttttgccaattttagtaaataatttttttaaccttttcacccaacaataaaggcaactgctagtttaatgagatgggccgttcttcaatttaatattttaggtacgaggtatagagtcttaatttataaaaaggtacaactgtattaaaatattgattctgtcgatatatagctactctatatactaaaaagtaatattattttttatgttacatgcccgatatatcactttacacactgtttacttaaatctgagattctagcaaataaattgtttaaaaaagggtaatattgacacaatttctggtgtaatatcgataattccgtattactattttgaataatttattgactctggaatagcggttaaattaaatttatagcagttactacttaattgtggcacaatcttttcaacaatagaatgctttcccacggagataattaaaattgcttaaaatcggaaatatttccgaaaaatagttgctgacgtaatctgcaaaaatatcttatatagacgcgactgtatcttaaaattttttactgtcgcgactatggggtgtacaactttttttaaaaattttaaaaacttccttccctccccccatgtttgattgaaatactcccctcttaacacagtttttctcaccacattacatcaacattttcattaaaatttaactatctcaaacattatttccatttccgataatcggtattaaggctttaacctatattttatcaattcaatttctttcattaactcttattatataccattcatagacaattgaatatcaattgtactttacttaaattcaattagtattgtatccgttttataccggatattaaaacaaaacataaactcgatttaactcaaaataaattaaattaaattaatctttactaatcataatatcaatagccaaaatctgcctcagtatcagaaacaactgtaatatctgtaacatacttacaaaatgacaattgacaaaaaccaagataccaataatcaaaatcataatcaaaatcataattatagttatgaccatgatcataatctagaagaatctgaacaacctaaaacacatcaaatatcatatgatatatcagttcatgcagtacccgttagtgaaccaatctcaacccatacacaagatttattatctttcaggttaagaatgagtcagaatgaaataacttcagcttctggtgcattagctggttttttatcaggtttagtagtgtgtccattagatgttgctaaaacaagatttcaagctcaaggggcttatttacgagataataatagtaatatcaattcaacaaataatattagtccaaaatataaaggtgcatttcaatcaatgaatttaatttggaaagaggaaggtataagaggtttatatagaggtatagtaccaattacactgggttattttccaacttggatgatatattttacttgttatgaacattttaaaaaaatgtattcaaatttaatagttgatgaaaatttaagttattttgcaagtgcaatatcttctggtgcaatttcatcaactgtaacaaatccaatttgggtcgttaaaactagattaatgcttcaaatggataatggtaaaaatatttatgatagtttttcaacagctaataataataccaccaccaccaatactactgctaataatacaaaaataaaaagagattggtataaaggtacaattgatgcttttattaaaatgtataaaaatgaaggtataggagttttctataaaggtttattaccatcatattttggtttatgtcatgttgcaattcaattcccactttatgaaaattttaaaaaattatttaaattaaataataatgaaaagtcaccaatgaatgaaacttcagtaactgaaaaggcagttgattttgttaaatttatattggcatcatcattatcaaaaatgattgcaagtggtataacttaccctcatgaacttgtaagaactagattacaattattttcaaatagtaatgaaattttaaaagaatctcaattaagtggtttaattagagttataaaaacgattatcaaaaatgaaggatttttgggattttatagtggatttgtcatcaatttagctagaacggtacctgcaagtgctgttacaatggtttcattcgaatattttagagaatatttccaacgatttagttattgattttgatctaagaaaatattatcttattattattattacctttactattacaattatatctataatttataaatcttataattcgtctgtctacttatctatgatctgtctatttatgtgtatatacaaaatttcaaatttaattgcaaagaaacgatatatatcaaatttgagataaacacgctccttcagactgaaatttttaatcatgatccacccggaagtaaaatgtgcatgattatttttagtagtatatctatcgaccttctttaactagaccaaaacacacaacaatgaaattaacatcacgtttctcattgttatgctggttagtcacatcatgtaatagcatctgatggcaccaatgaaaatgataaagaaattgatgtagaattattacattcgcaagttcccgaacctttaacaattaataattttgatgaaacacttaaagaaggttttaatatggttgaattcttttcaccttattgtccacattgtgttaatttatttccaacatgggcaaatttttatctaaataatgagaagttgactaatgataataaaaaatataatatctatcaagttgattgtgttatgagtggtgatttatgtgagagagaaggaatacattattatccaatgataagattttatggacctgattcaagattattagcttcaatgacagattctgttagaactatagatacattaactgaatttgctgatgatcaattattaacatggaatgaagattttattgaaactgatgatacttctttaaaaattcaacaagtttatagttcaaatagattattagataatagtgaactaatgagaattattgaaggtgaaaaccaagttccttatttgattactttttggccaacaacttttgaccagcttaatgataaaaatttccaaaataaagtttcacaacatgttatgtttaaacattttgaaagtttattcgaatttagaagtattttaaatctaacaataaagaagatgaaaaaatttattgaagatgataatttaagatttggttatttcaattgtgcatccagtaaagaaatttgtaaagaattgggtctttccaatttaattacaggttctattaaagataatacttatccaaaggctattctttatttaccaaaagatacaggaggcaatgcaattaagtttaatgctaatattggttcttataaaggtataaatttagctgctaaatctttgagtaattggattgaatctacattaatcaattctgaattgagagatatgaaatttaatgaaatcaaaaattttattggaggaacagttaagttagagcaaaaaggtagaatttcagaatttacagattattctaaagttgcaattatccaagttaatgatccaactactaaatcttatgaagatgacattattctagaacacttaattcaacccattgcaaatttaaataatgatgttttcctttttaaaacaactgataatgaaatcgttgaaagatttttacttcaacaagagaaaaatttagcaaattcttatattcacccaggtggtaaaattgatgaaagtattgaagataatgaattacagtttaatgaaaaaatgtatatttcaagaacacatacttcatatccatattatatatgcttgaaagcaggtacattatacacgcctgttctgcaaacctatggatcagaagattccagaaatgttaataaagtggtggaatttataaagaagaactacttacctgcagttactcatctcacattagaaactgagaagacattattccctaatacttttgataagatgtttaatgataaaaacgaaaaggttatcattgcattaactgatttccaaccaaaacaattttttgatgttgagtactttttatcatacgtttatcataaattcacattattaaataatcataacctttttaataaattagaagaaaaaagagcaaccaaacatgaaaaagttgctaaaatgaaaaagaaggatgcaagttcagatgatattattgatgcattaagagagaaaattgatataaatttttcatcaattgaaaataatgttcatgcagcatatattgatatcaaaaattggaaatcaattgtgaaacatatgaactggaccaacatcaagatcagtgattatggtgtaggtgatgttttaatagttgaaagatttggtggtcgttattgggaccatgatgtttcaggtaataaaattacaattgataatgaagaacaatgtttaaagtcacttgaggctgcaactttcaagaatttgaaaagtaaaaatttaaaggatgcatcatttttcacgtttcttctcttttacggagcagctttagttttatttttagttggattccgttattataaacaatggagtcaatctaaaaaacattataatgaaaagatgaaaggactcggtttattaggtcttacacctgaatttgaagaatctaaatttgattagagtattatgagatactctactgtataatataagtaatatataatatttaatatctactgtatatatctgaccgttgatatcatcagaactttaagatatacatcgatgcatgtacaagaattgaatattgtgttacgtaatatttttgaaaacatgaacatgtttttttctaagaaaagaacaaaactatagttacatttaaattccattaaattttttctttcacgtttttcacaactcttaaaaacatcaaaacagcaatagatgttcttggggtataagatttcttcaaggatacgctctgtgaatattagctcagtggtaacgtatcgatgttttgctactgtaacaaacaaaaaatatgaaaatgtcattttcaatagtcaagtcaaagaagcaatcaaaaaatccttcggaaatttcaaaaataacttgaaaactaataatatatccaattttaaatcagaattaatcaaaaaacaatataatatagactttttgaagaaaaatatgaatttactaataaggagaacgaatgagattgaaactgaagttttaaacaactccaatgaacatttagaaattaatgttttaaaaaaatcttcacctcaaattttacctaaaatgattgttccatcaactaaatcaatttgtaaatcagttgcatatttaatcagtgataaatcacacgttgattttgttccactgactatcagatcagatttcaaatccaaagatgataaattaaattatatcattgatttacttgttgaaaaactattatatttacgttttaagccatattatctacaagacatgtacaatgatagtagtaataatcaaaattataatcaaaatttaactttgaatattatggatatcgacaatccttatgagtggttcccacaagcaagaaaactaaaacgtaaaattattatgcatgttggtccaactaatagtggaaaaacgtataatgcattgaaaagattagaaagctgtgcaaagggttattttgcaggtcccttaagattacttgcacgtgaagtgtatgataaatttcagaaaaagggtgttagatgtaatttagttacaggtgaagaagttattgttgatattgatgaaaatggtaatagagcaggtttaacatcaggtacaattgaaatgttatcattaagtgatgcatatgatgttgttgtggttgatgaaattcaaatgattggtgatccatttcgtggttccgcttggactaatgcaattttgggtgcaaaggcaaaggaaattcatttatgtggtgaaaaaagtgcaattccattaattcaaagtatggtgcaaatgacaggtgatgatcttataataaatgaatataatagacttggaaaattaattgttgatgatcaaccagtttcaattcatgatttgaaaaggggtgattgtattgtttgttttagtaaacctgttattcttgatatgaaatcacatgttgaaaaagaaacgggtcttaaatgtgcagtcatttatggtgctttacctccagaaactagagcacaagaagctcaacgatttaatgatggtgaatatgatgttgtcgtagcttcggatgcaattggtatgggtcttaatttgaaaatcaatagagttattttcacaactactcaaaaagtatgatggtaaggcaaatgtcacactttctgactcaaacattaaacaaattggtggtcgtgctggtagatttggcgttggtgagggtgaaggacacattactgctattgctaaagaagagttaaatgttgttaggaaagctattgaagcacctattacatatttgaagaaagcgacattatggccacctgatggactgtgggttagatattattccatgttccctgataacataaacttactttcaatttatcgtaagtttgaaaatgatatttctaaacattatagaaaaacaaaggatgttgaaagacaatttttgcttcaatcattagatgacagaaaaacggttgcaagattctttgaagctcagaaacttaccgataatttctacattcaagatcaactaagatgtattgcgtgtccaactacaatcactggtgcaccaatgagggcacttagattgattactgatgatctctttgcccaatttatgaaaacaatcattacaagaagtagaaagtccatttttgattttgattcaatgcctttttatgttactgcctggtgacgatgttgctgaccaggaaatactcaaaaaccaaaaagtaaatacaaagggtggcgacatcgagatagaaccagttccttcctcaattaaacaagatattatagaaaaaattcaaaagaaagaaatcaaagaatttgaaactttaagaacaccaattaataaaatggtacctgctgaagaaagattaatgaagttagaacagtttcatagacttatgggtacttatatgtggcttgcttatagatttccacaatcatttactgacatccaatctgcgaataagttaagagaattgattgaatatagaatatcacaaactttgaaaaacttaagagcttctaataaattgaataaaggtagatttaaaacattctaagctttttaaccctgtatataatagtaatacttgatatagaaatatttttataaaataaaattatattatccagctatccacttctgtgtctccagattttatcaaaggttcatcaatctcgttaattttactttctgaacataaacaacatgatgtagataataattcatctatttgttcttttgcattagcatcaattttatgattatggtcctttgatgttatttttttctggagcttgtaaatagcatttctcatcttataattgcttgagttaagtatgtacttggctaaacaatcttggtggaaagcatgtgtacatgggaaaatgatgaattttctaataataagaattttgtggcatatttcacaagagtcagaaggtgtcacaaattgataactttttgcctcaaattctgctattttggaattgatgttctctgatttttccagtgatttctccatttcaattgatagtttgttcatattatttgctaaaacttcaagaaattcgactaaaaagtctttaaagttatcaataacggtaaattctgggaataatggtagtaaatccttgatagtcaaatttccacatttgtttgttaaaaattgtaacaactgatatatttgattgttttcacttgtttcaacatttgctaattctgattgttctccctcaagctcaaacatatcagggttttgtttaatgtagttaggactcgccaaaatcttgttaataagttttccacttatatctaaccataatttttttcttcttgattcatcgacagtgataagtttatctgctaccataattgcgttatctatcaaatcgttctgaagggcaagatcgacggcttcttcgtatttttcagtcattgaatataagaatatagcagactttattttattggatttatagcatagtctcaaaataaaatcgtaatcaaatgaaacatcagaaatagagaatttggaaaaagagctagtttttattaattggtattgttctaaataaagcaaaattgaatcctcatctgctaagttaggataagtgataagtgtagagaaaaacaaattttgtatcaatctattttgaacgtatttctcataaattagaaacttcaaaaatctaatagcttggttgttctctggttggatattttgaggaattgctattatcttattgtaagttattagtgctggcatcaatttgattggatctatatcatcaattaatctcatccacgcatcaactacttttacaggacaatttatgagcaatactgttgcagaattgtaaattaagtaatctttttgttgagctgataaatttgataatgcatcttcccatttctggatgtgttagaaaatacttgataacaaattcatgatcacccattaattttgcaaaatacaacagatcttcacttctattatgtgatatgattatttgatgaactgtggcagtatcaaacaatttcaaattttccttcataaaagtgtgaaactccaaagttaaaccatctatggcagaatttttctttgtattaatagttgatgagctggaataatggatctacaacagacttggtgacatcacctgtatttacaaaactgttttctagtgagttcaactcctccacataggattccacgatccaacaagagagtaattttttttgtgcaacttctgtcttagatagctgatttaagtttcttctgaaggtaatagcgtaatagtgatttgtcggaaagttcaaataaaagcaatgcaactttatcaaaagattcatcagttttcaaaaatgtgtcgatagattccttgtaatttttgttttccatcaaataatatgatttcttcttcagaatttgatttatttgaggattctcatcacttcagattttcaagtgcctcatcgaatttgtttatactgactaaagaatttatgattcctgtattttcagtatcaatcaaaatttcgtatattttcaaatcagagtgaagccaataagttttcgatttttgatcataagataatccaatgatatttgtattgaatgtcgtcaacggtatacttgccaaataagagtaatttaactgattatacacttccagggtatttctcgcagttaaaactaaaatgaaataacctgttatgagaaatgactttatcttttgcgtaacgttaatttctgaaataatagaaaggttgttttccgtgatatttttatctttcaaacatattttagaatcacttctcacagctaacatgtttgcattttgtgagacttctgtgatatgtacaggtgattccagaggtatgaggaatagcttttgctatactttgaaaaacagaaatatttggtgatggattggatggaatttttgtggttaaacttataatttgattatcacttgtcacaaaatcaatcacatactttaagatcatgttctcatttgataataattgattcactacgctgactactgaatagttatttttcataactgttttgactaatgtttccttacatgaactgatggaatattccagcaccaatgaattcgacgtggtgactagtattggtccagtgtaattctcagtgactacttcatcaaaaaataagatacttgtgatatttaagtttttaagtttgggtagattatgatactttgattgtttgtaattgatatagaaatattcgttttttgaacttttcagtattaaatgatatcgtttgtaatcaatccagccatttgttatagttgagtccttactcattttaatttttatactattaacattctcaggagagtcctaagtcaattctgtataatactccatttgtcaatattaaatgcacaaaattgtatacaacaaaaagtttgcatatttttgaattgagggagaattgaagttgaacctcttcaatttgaaaagaagaagcactggatgagttagcttccactgtatccatcattcctattatcactatagactatatatgacacagcactaaacaatttgtataaattaaaagaaagaacaaaaacgatgttgatgatgatttattatgcaccttccgcaacatgattttcaaataatttaatgatcttcttttttctttcttcatcttcttcttctgctactttctggtttttagtacagataaacacatatgggatcaagtatacctcttaaacttttagtggaagcacaaggtcacaatgtttccttagaactcacaaatggtgtatcatacagaggaaaattagttgaagctgaagacaacatgaacgttcaactggaaaatgtggtaatagtggccaaagatggatctgttaaaaatgcatcacatgtatatattagaggatcacagatacagttcttttcaatacctgaaattttatcaaatgcaccaatactacaaagatccgctaataaatagacatttttatctctattgttcaaatacttaactatgtactataaaaacccgttataattaaaagaaaactagatctaatcttttagatgaaaaaatcaagttaaacacccgtgtagaagaacatatcttatcaaactaaaaagaagtatccttgttactatgcatagtttggtataaatgatagtttagtaatatacaaaaagaaacaccaccaagtttataaaaggtaaaaagctataaaatgtaatatttgtaaagaataaagagcattaatcaaaaccttccaaaacattcaacactctctccagtctagcgcaactttggtcatatctagctggattaagcatcatatttgcagtaagtctactaatagagtcaactattctttctatcaaaaatttttcttctgctggtatattcaaagttgcaaattcttgtcctaatataattccatctgtagcgttcagtaatttagccaaagtttcgtatgaaaagggcttaattttgcccttagatgatgttgatcttcttttggatttgtgtgaacttgaacttttcgttttgtatgatcctgaacttcttccttgaggggtatgttgacttgggttactattagatgatgcagtttttgtatgagttttcaaactttctgtactcatatttctttccatgttaataatatcattatcaattttaatcttcatctctactgcttccctgtaaatgtaaaggtggttcttttaattttattgtggatgctgctgacggatcaagtgtcattaatctggattttctaggtggaattgcaatatcaagatctaggtttctagttgaatcatcatcacctgtttcatatgcattttcatcttttccagcttcaaaatcttcaaagttagcatcctgatggctagaaatggacgcattcgcagtatgaaaagagctcgatgcggtgactaatgagttggacgtagatgttaaagacatggattttgattcaggtgcttgcttagcttttgaaattagcttcttctcaatttcatcgtcttgcatctccaccaaattctaaagttaagtgctcaacttctttcattatattgtccaatttgctgttcacacgagagctcgtagagctgttgcttgaagtcgatcttctacgtgatttatttttcagtggtgacgaattgattgatgggtttatcatacttgacgtaccagtttcgttcagttttggtaatggggatttgggtggtgatgatataagatgttttttcactggtgaattttcactatttgatttcagaatctttgccatatttacactatcaaccgattgtaaacgcttcaaacctcccttctgttcttttgttgaatccatggatacaatactgttgtttctactgtgacttggagagtgtagtactaaaagttcgtctgatgaagagcttaatccactcaattgtgataactgtaaactttccttattaccaacgtatttaattgtatcaatatcaacatgttggataatacctgagtattctgaaagcattgaagcacggttagctgttgtatttctgtataaacccatactggtgttacctaaacttgaaacagaaggtttacgaggagcagtagttgatcctttagaactatttttgtttgtagatacggagtttgagttggacaatgaagcagaatttattgttgaatgattagaattttgaaatgaagttgatttaggaatacttaaatttttggaattagtttgtgattcagtgttagatcctgatcctgatcctgaatttgaattttctcccaaatcactagatgaatgatcaagatgtgatcttccaggtggtggaagatatatattatctgattggtcagtggtatttccagaagagtttccagaagatggattctttaaagtatcattatctgacatttttattgatgttggttttgttccttcagtacgactgaaactgatatttcttatgacaccttgtttctccgcacccatttcaagtaggatatgtgtgtaatttatagaacctttttcttaattaactaaccaaaaattgcaaaaattcgactaacaaggtttacagacgatcaaaagaaagggacactagatcaatttctgaatggatcaaggaactaatgcgtataagtgattattgttaaaacaaatttccaggtgtcggtggctggttattacattacccaattaggtaattgtgatatcaaaaaaaatggaaaatcagtgctatttttaattttcgattatattttaaataaacgaggtagctgaacttaaaatgtttggttacaagtataatataaaatgttacataaattgctaaattgatggctggtttgccagttccaaatatgaagcattattattctcctagttgggtaatatcatcttctgtagctattaaacccatagcattcaagaataagttcaaattgttcatgtatcttgaagccttttcaaagtcaccgctagccttgtattctttacatgcagccataactccaaaaatctcacctctaatttcatcaacaataactctttggtgattcaatttacctgttaatgttaatgaagctaagaattgccagatataagaatcatcttcatcagattgctcatttgtgactttaattgattcatcatgtgatagatatggtgggaaaacagtatactaatctaccttctaatgattcaaacatttcattgtaaacagtttgccattgagaaagttcatgggcactgagtttttcagatatttcttgtttaattaattcaagtcttgaaattaaaactgtaataattgataaaccaattttggttgttgataagaataatgttgtcttgttatctaccagtgatttaaaccatgataaaactttggaaaaacttgcttcactaatgtatataaccaaattgttcaaaactgtaacttgaaataagtcaatctttttaatgatatctttaggaatcaaatagttagagtcgacataattcttgtatgatccgtttctgataacatcaatattttgtaactgttcaaaaaatagaccaactaaagtttccttttgagtttcggttaataaatggaacgttctaccaaaaaccttcatcattttgtcaaaggctaatatagatataaatggattaacaacttcattagaagaagttttgataacatccttaatatgtaaagatttccataattcaatggtttcatattgttcattttctctttcctaaagactctaacttcaaaacctcattgtatattttttcaataattgacaactgaaatgttcttgcagactttgagaaagagtattctttaggaataacaacctcacttaattcaaccggtgcatctggtgcatcagcttcgttagaattttcgttcgtactttcagttggaataatcaattgttttcttggttgcttacctgaaccataactgactttacctaacgcacctgccttagttaaaataccagtatttgcacccctttcttttgcaacagaaacagcttttgaaacttgttgttgcattctttgtaatgcaacatctgctctcttagatctaccaccaagtctgtgacctgattgttctaaatatttttgagctaaagaattcatgttattgttattgttggagtttatagctttgtaaacttgactgtaaaaatcttcattatatggatcgtcagtaacaatttgagataattgaaatcttgtaacgaaatctttatcttttggagtcataaaaccggaacatctggtaatagttgatacttttctttgtctaatcaaaaagttttcacgttcttctggtgacatttgattcaattgatcttgtaattgatgttgtctttgaaagttgtgatgatcattgtggccaccataacgatgcgtttggcctctttgattgtttccttggttatatccatgtgaacggtagtgttgattttgatgatttcttctaccattgtgcatgttatcactgaagtcattgataatacttgaatcatctgagtcctcattactgaaaactggttcagaatggttaacatgaccattactcttagcgcttgcaacttcaatagatggaaaatcgttcatgtctatggttttatctgcttgtctatttggagattggactgatgtgtggggctgctcaacttgctgaccttgagataatggttgagtttgtggttgaggttgtgaatggggtggtacttgttgttgcgcttgttgttgagattgtatttgattttgagtttgtggttgaggttgggattgtgattgctgtggaatgttttgaggaatcatttgattcatatttggattcatgattccattttgagcagaaaattgtggatgcatttgcatcataggatttggtgttgataataacatttggatcattgcttgtgttgcagtttgtaagtttgggaatcttcctgatgagacagcactatagatttgttgttgaattgaaggttgatataacatttgagtgatgtaaggtggaagttgaaactgtggattaacttgcatattcatgttcatattcatattcatattaacgttattaggtggttgaccttgccccatattcatattctgttgttgcatatgagctaatggagcttgaccttgaccttgaccttgtaaattttgagactttaactttgcttcaatctcttgtaatgaaggaactgatgaagttccttcgttagttttattgacattagatgattcgtccatccataatgaagccattggttttaacatactatcgatatttgaatgggcagctgctgcgtatgaaacatttgttttttctggaattggtgctggtttcaatgatgatttcttagagttcactccaccattagagaaatcaaaatcttgatttaaattagaaacagcagcagaaccgaatgtatcttcattaaaagcatcatcatcttcaagatcgttaaaatcaaccgtttctggtttgcctttcggagcagccatagggtcaaatccaaagaaagacatttggttgttttttatattgcaatgactaagtagttatacttcaaagacaatttcaaagcaaacgcagatcaaggtagcacacatccacccaccacaacttcaagttgaaaatggccaccaagttttccatgtagcgaaacattcaaatgcacagaattctgtcatttttctgtgcgtgcaccttttatttatgattaatgtgcatgcatggagtctgttgatgatgtatagacaatcaattggtggtgaactgtaatgtaatagaagtggatcttaaacactataaggatataaatagtttagtatatatgataagaaaaattatgtaagagaataaaaaatgggaacgtcaaatgtattatctgacttcaaatcttctacctgaagcagtctttctttcagaacgaagttcagcctcatcaacctctctcttggctctattcaagatcttggtgaaactctgtactctgtatctcattctttgatgtaagtaacattttacaattttaatatgataatggaaataacttctgaacatttgaatgtgtgtgatagtgttccattttgcatcctctgtatttagatgtcttgggaataaaacaaatgtgatgtaagttttatctcctgtaggtttttcaatgtgttgaatttctagtggaacatccttatgagaattgataacttgtggtgccttttgaatagatctttttctagcatcactgaattcttgaaggaaaattttagagaaaatcttatcagtttcatcgttgaaaacagttgagaatataactgtaactctatcattggatggtttaatgaaaatactttcttctccacgataatctaattttaaaacttcttcgttattattagttgcagctacactatcttcaccataaatgttgtttggatcagctggattttctcttgatagcacttcatatctcttaaatgcctttaagaatggagctgcaaaacaatttctcttaagtaaactcaattggcacacaagttcagccttttcgatatcatttaaagtacaattgtttatatcaatgtataatgaaacatcgtaacctggctcacatgatccttcacttaaaatttgtataaatgagtaatggccatacttttcctttaacaattccaatgacccatatttagctaaatctgaccaacatttaataccaatcgataacaatatcttacctttatcttcgggagtggagatacgatatgttgtaaaatcaaaatcagttaatattctatctaaacttggaaactcataattaggtgacaatgctgatgcaaatgtttcctcaatgagtaaattttgtggttctagttgtaacatttgggtattgtattaactataaattgataaagactttgaaaatatgaacctttaaagaaggtatattagttgtgttgagaatccaatttgcctcggttactctgcgcataacaaaaaactgtcttttgcgaaatgcagcttttccctacacaaaatttctacaatcaccttatttggtctacttttcaagaggattattatcatcaattttcaatgtggaatttgtattgaaagttttgtaaataacggaaaataaatgtatatatttaataatgtatagtttgtaaaaaaataggctggaaagagaaataaaaaaataaaacaaaataagacaaaaccaaacaaataaagtcgataaattagaaaaaataaaatgaaataaagtaacgtacactaagtattaaatgctggtaaaagggaataatatatggaaataatattatgaataaaattcattctaactgtttcttggtctctggtttgactattaaatctttaagaatcatatcataaatttccgacagtttgttgttatccttttcaggggatggtgaatatgtaatttcgtgttctgaagcttggctatcaattgatacatcatcattatcatccaaacaagaatctatattagattctacttctaagttagatcgagagcttgagggtgaatcagaatatttcttcacaaataaatcatttatttcaacgttattatacttgcaatatttcaacattcttatcaaatcgtatggatccttagttgtaagaattgcctttttcaatgattctgctttttcgggatttttcttcaagtccttgataatgtcatttaatgagtttgtagttgaactttcaaatgaattttttaagtattcatcatattgagaaagatttaaaacagaatctgtacactttttagttgagttcaatttattattattgattaattcaatagctttatcaaaagacttatcaatagaaaacagacgaattaacatttctttaccctcaaatgccaatgtaccattgttttttaactctaacaattgtgaaattaaatgtttaatgtttgatcttactaaaacaataatacccaaaaatttatccaatttttgtttatcaaaatcctttgacttgatagctatcattaaggcatcagtaaaagacaagttgtcctctattcctaattcttccttgataatttttctatcttcctcactcattaactcacttagtaacttaccattttttgctttcaattcaccagtactcctatacaattgagtttcaatatttctcattgtcaataaaccgattctttcttctagttcttgtatcaatcttatcatcatctaaactaattgaaactaaactactggaatattctaaagttttacaaatggattcaataacaatgtcatttaattcattacctttaatggataaataatttaatttttgaacatacggaatcaattctaaaaattgaaccatcgacttggtactcaaattgttgtgactgatgttaagtcttaataattgattgaacaatggaagataaattgataatttcccaatgtatgttttcattaatttggaattggatgataaatcaagatatgataaatgatttaattttgacaacgagttaaagaatagatcagtatcttgacaatcgattaaattacacgaatttaagctcaacatcatcaaattattatctgtattattttcactattaagatattgaatgaaaggttttaaattggatgacaaatcgttgaatgctaaatcgacaccaactatattagaattggattccaaccaacgtgcgataacataacagtgctgtaaagacaaattattgtaagccaagccaattttagaagtttcaactaatgataaattcaacatgttggaaaataatttcaaatctggaattttacaacctgtcaaaatgatttcatcaatgccacctctaaaaatgattgacgcagttaataaagcccagtttctatcagatctatcattaatattacaaaccattctactttcagtagctgactttgatttcttcttaatcctttgagtattgacatctaatgcactacattgtgttatatccagtttcttcaatgccttgttcattgataaaaataaacataacattttccaaccttcttcatcaattggatgtatttcttaacgataatttttccaagaatttcttatataataaagaggacaaaatgattctaaacatttcagttgttaatgaaacaccatctagagaaatacatataactggagcaattctgataaaatctgtaaaggataaaatttcaatcattgaaggtctaggatttcttaaatgtaaataaggtattggatcagttgaaccttttggaatttgttttaatgttgccggtattggtaaaatttcacgtaagtgacaacatctcgtgtataattcatccattttaagtgtaacaacaggagcagtccatatgtttctttcttttaaccataggtttgtcaattgtcaaaccttctttttgagcatcaatattttcagaatcagcgtgatgttctctagctttctttgctgccagaattctatcttcagttttaattgtttgatccaaagaagtttgtgatgcagttttagtcattgaagttgcattgggtacatctatttggatattatccctgttttcaagcaggtgttccattcccgttttgtttttgttgttgttgattatcttgattaatcaattttaaatgaccagaaccaccaacaaccataccagttgcagaatttaatttttcttggggatcaattttatgaataattaattcaccattcggacaaacttcaacattacccttccttggatttcttgatgggatttgctggggaggatcagtaacaaaagttgtagcagcaaatgcaacttttttcattggtttcaagtttgatagtgcttttaaaggcggttttctatctattttttgaggtgggggagtataattcaaaggttcaaagttgaaaggtggtgtatcttcactttcattcaacatgccgttaaatgcataagttccaggtgtgtttgttttggttttgtgtaataaacttccaaacattgaagattccctctcttctttttctttcctatattttaaaaacaattctttttcaattggagcaccaaatcttggctttgaagttaatgcagaaggtgattttggtgcatttggatgagcaggaatcttatcttcggaatatttgatagtttccaaacctatcggtgtgtagataaaattatagctgttgatgtcattttcgatatcatctttcattttatgtgcattggatgattcaaattcattaatgtaagttgctaattcaggatcaatttctttatattgatcagataatgataaattttgttgaaatgactttaaaatattattagcactagattcgggtgaagcatctgcatctaactctggtctttcagaggaagtgaaagagtttgatcttgaattaaaggatttagtattcgtagaattagacgatatggatccagaaacggatggtttgagagtggattgttgtgatgtgggagaagatttggaattaacgtttgaagttgttcttgataaatttgatggggaagatgtaataacattagacattggcttggatgcagaactgcttttgtaaatgttcatttcaggttttggatcatctgatttagatccaaacaattttttgaaaaatccttttttcttttgtgttgatggaggttgtaaaggttcatggtatttgggtgatggctttgcacttactcttgatttcccaacatcggaagtatcgacattagtagcggttctatgtaatcccgaattgaacacttgaacccgtattgatttttgaaattggattcatcatccttgcatctgctgttctagtcttcgataaccccacaaagaaattgggatctttggaggcagaagtagtagatactgaaggaggggacttgacattggggttgttagcaattgaaggagatttcaatggagatattggagttgcagctaataaagcagagttggagactcttggtattgttgaagaagttgaattggtactcggtggttgaatataatcactagaaagtgccgaacatgacaagaaccaatcataatcagtactatcggaggacgacttcaaatgggaaagttcatcctctaacctctttctaagtttatcgtgttgagaggattcggcagaagccattggttggaataaaaagaaccaaatattaaaccaatttcaaatttaaaacagtaaaagatggtaagctcccagaatgcaatcgatacaacattacaatactttatgatcatgatataccatgatataaattatgagctgagctggggcatcaactaaatcgattaccgggatttctttgcgcgggagtgggtttttttcactgggggtttgaagattttttgtgggggtttaattgagtctgatgatgatttatcacattgcaacatgatttcttcttgtggaaagaattgataagtaattgataggtcaggtttgatatacagtgacacaatggcattgaacaataaggcattacttatcaacccagggaacgaaaaaggtctcatccttataagaagacttgtccaaagcggatatttaataactgcgcttagcccggacatcccaaattcaataagtacattaggacagcttgaattcactaatcctgaattaaaagattctgttcaaattattacattttcaaatgatattatcaatgatccagctaaaataattgaagctaccaatctttcacaattaccctcacaagagtttctattttcatttaatccaaccaaggatacctttgccaaatgggatttgaatttaatttatgctttatcaaaaacaaatgttgttgaaaaagattcaacccttatagtagtcggaagagatgcagagaatgttcctgaaacggaaaataaggcattacaaaagacaatggctaatttatacaagatgttcaaggatgagaatattacattcgtcgatttaactgaagtaggtgctcttccaggtgatgaaagttatgtcgtcgacacatatatgcatgaggttattagaagatcattcaaggtaaaatctatcaactcactagtaaatatttacaaatatattatctaccattatgttccaggtttcctcttaaacattgttatatatttccaatcacttctatctagtttattgggttgctctgaaaaatccaagcaagattaattaattctatctttttacattttttacattttatttactctttatagttcaggaaacgttattattaaactgattttttggtcggtttaaatcatttcaatcaaggaaatatcgttgttatgtctactattattaattaaaagttatatatatcatatcaaatgggtttatactaaagttaacattgatttaggcttttttgatttttctttcttcaaatattctctaactaaatctttgtaatattgatgatcatcgtcatatgttgatatatgaatatctttgttaatcatacttatatttctttcatttttaatcttttgtttcttctccttttaggaatatctaatatacctatgtacttctcctctcccaaaaacttttcaagataaccttcaggatgttggagtctgaaaccctttgtagcgtctttgcctgcaaatcttaataacttgtcttgtcctcctggatgcatttgtaaaaactcggtaacatcataaacatgaccatgcacacttacccaacaatcatctggtttattgtgcagatttaactcgttcatattaatgagtggactttgtaataaattatttgattggtatccactatcatttgaaattgtttctagaaaaccaactccggctaaaccgagaattgatgaaagaaaaagtacatttggaatgtatcctgagttactgtagtattttgcacccttttgagctaatgtatatccccttgtaaacattttgattatctatggtccaaagaaatattacacttaaccttctcatgattacatgcatgcattaaaagttgatccttatatatcagtccttttaaatttaatcatagaaagaaaatttgaatattttccgattttcggaatgcttcccattttgggaataaagcgccttataaattccactctgtgagagataaggcatctgataccgagataacttttatcatatatatacaccgtgggaaaaatttcgcacattgtcaaaaaataatttttaaaatctctggcaacattgactttggaacttttggagccaatttaccatacaaatttgttagtaaaaattagtcaaaaatcatcaaatttccttagtaaactacgcttacgtaataactccggacctattaggtaagcatctttatagtgattacgtaatatttcatagttaaataggttagaattaaataggctttatacacttaattaatagcttaaataacaaaagaaatataccagcagatacattgaagtgtcaacaatacatctaagatgttaattgacccataggttcagcatttatccaggtattcaacaatgaaaattagtaaaaatagtaaaaattcttgtaaaatagcaattaaaatattgaatcaattaataccatacacctaacatcatatcattgaattataagcaccatagtagcattgaataataccaataccttaataaaatagaaaaaaagatcaaaaaagcaacaacaaacaatacccaacatcaacaacaacatcaagcaacattaagcaacatcaagcaacaacaaccattgaaaaacaaacaaaagttaatgaacacagtaaaataaaatgacaaattaaaacaatatggcaatgaatttcaagtattagtaatcatcaaaaaaatcacacccaaaagagaacaaaaagcaacctaaaagataatgctgaagactcaaaaatcaatattaacaacaaacaatatgagatagtatcaacatcaaacaatatcaaacaatattaaataattcataagcaaacaattcataagcaaataattttgtcttacactttattaaaaatagaattttaaaactaccaatcacaaacttagcaacatcatgataagaagaaacatatttcaccctcctttatcttcttcttctttttcagtttattattcttcatcttatcattattatattgagcaaaaactattaagaaaaaaaatgaaccaattagccaatgatgaaacatcccctacatttcccttacaaactacaattgtgctttgaagttgcaataaataaactaccaattaataaaacaattttaacattttcaatattaaataatgttacttcaaaggctttaatttcatcagggattaatgaattaaattgtaacaatcaattaatattgaaaatcttaaaaccattttatcaagtgataatcatccaatagaatctcatagattgaaatgaacagtaatttaatactcgcccaagccaatctttgagagatttatcaacattcgcacgaaggtgtttcatcatcgttcatcagttcaagttcttcctcagtaatataatctaaagagagctgcatacaaaacttaactagcttcttcatatcttttattggatgatcattaaattctttcgagtctcttgccaattcatacaataatttggtaactgttctgaaagtaaaattgtaaaatacaatcctcaaatgaattgcttggataagcaacgatttaatgaacaaaggatgaaagtgtaaattgatatctggacacactgaattgatgtatctaaactccatagaaatgatatgtctatttaaactatcgtgccctctaaaaaatcgaataatgttagttgacggtgccatttttgaaacaaaaaactatatagagtcattactctaccttatatcatattctatgacgaaattgttgtccagattaatatgatttgaagtcatttagtaaagattttattcctgtagaaagaaagagattagagtggcaaagcaaagaaacaaagaaggggatcttaagatagtaataaccaaacagggcaactttcaagaagcaatgacattatttttattacgtaagcataaattataattgtatttcaaatataacatgaattataatcatgttttaccataaatacacaattataaaagagtttaaaagcaacttatatagcaaattaaaggtttaaagtaaagatctaaattggttctctgaacacagcagaaaaatctgggtgtttatcaaccataaagttacgaaattcttctaaaatgttaacaccaaataatgtatcagaatcatcaaattcttcccatctttcatcatcattctctgattccataaacctagcaaaaataaattctaaatctttactgtaacatggtaaccaaacatctgaaatattgatggtgttgtactttatacttaaaacattggcatcatcaaacataaataataatatctctttcactcttatgaaaatccattgatcattctttcttatctttgcaaaacttcttggtcctactttctctattctagtatttctagagtaaataaagcctagccttttaactataagattgtttgatttcaagtcatacttcctcattaaatttttagcttgttttaataattctttattgatatccaaagtttttgatcttccataagtatagcacaaaaaaccatcatctttaaagtttgacaaataaaacattttatgatttgtcataaaacttaattttatttgaagagatttgaaaacattcaaacttggtctcgatagttttctgagatcaccacaaacacgttccatatagaaacaccaaatatctctaaaagaaccaaacctttcccaatcagataaaaaatgaaacatagtatgatttgcaagttgaaataatttcccaaaaattggttcatatttctcatctaaatacagagactctagctttaaacccaatttcatgaacccatctcttaatctgttcacaccatcatcatctaaaaatttttcaggaacattaaatgaaacaagactgacccaatatgcattatattctaataaatattttactatcataacataatcattttccaatgatggatcaagaagttctttttcaaaaggtaaaaaatataaagaaaacatatggctcaaagcttttgagtccacagctttcacttttatatcattcatttcatttttaaaaaaaaattttgtatcttttggatcttcaaaaactttaaatgatttgatctttttatgaattctctctcgataatccataaacatttttgatttgttcttatcaagagctttaaatttggaatttggaaacactgtgcaaactgcttttgcaaaaacattctcataaaaactgtgcatcaaatctggagtcactacatctaaatcaattgcatcacaatgtgagattaaaggctctgttttaactctccaccctttttttccaccaaactttttctcttttattatgtttttatattcttctgctgaaactttaacttcgttgagaaacctataaattttctttaatactttgtcacatacagaatcttcattttcatttgaagtttcaggatcttggtccaaattattcatttcctcatcctctgaatcaataagtggttttactaaaattttagtacctgtttttggtatacgacatgaataacaaggaaaagttcctttttgacctaatgtttccgttatttttgatatagaaggaatatcaccggtaaaggagatcaaattaaccttgaaagttatatactcatttgtagttggatccaaaaatgtaacacctttattagtgaggtactcaatttctttcatcaagggttttgccataataccggtaaaaccaatagtattttttttggttaaaaatgttatgggaacatgacaatagtccgttttatatctaacagactctggtaagtctaaaaaaataattgcaaaggactttgttcctttataagttttaatttgacagttgaaatcatctgaagcaatgcaaatattgaaaacaaatgtatttttcattctggattctttcattaaggattccttatatgcgagaccttgatttactgtaccatagaaaccactactattttttgctttttcctttacctctaacatcagttctctaatttcaccattcatatacatagttaccattgcagtttgaagtgactcatatctgaaggagagggcatcctttataccaagtttacatatgtcttccttttttggtggatctggtgcataacatgatttatcatcaatatgttcaaagaaatatagggattgtaaacatggacaaaacttaatggtaataccagtctgattttctttccaaagtttaagaactctgtcatgtaatttcctagtttctagctcatctatatctgtataacctctaccgtataaatattttaatgctttgttaccatcagtcattgatatcttattggtcgatgtcaaataaaatgtaaaaaacgttagtggtgatttgaactgttccatataactcttgttcataaaatgaacatacttttcaaaatcaagatcttttaccaaatattcccaagaatatttatcaatgtcaggtgtgtctatatctggaattgaaagaatattattgtcagttgtttcagtaggttggttaacatcaggtacagctgtattttcatttatatcaggaacatcattatcaattaatgtattatcaggttcattttgctcaatgattggatcacttggaataaaatttttatcgttagaatcatcaacttgtaaatgttttttgaaatatgttttacttcctgaatcaatcctattgaagtatctgtttgatgatatcatttttccacttttgttagtttctaatgcaggtgggatacttatactaatatctgattccgagccactagtctgttcatcttcctctggttctctaggttcatctaaaggaaacggttcattgtcaaaattctcaatcaaattattatttaaattattatttaaactctcatttaaattattgtttaaactctcatttgaattattatttaaactctcatttaaatcattattcagattattcaaattatcattctcttgattgttatcatacagattatcgttatctggcatatgatcatctgggatatcataaaatgccggtgatggtcttgcttgagtatattttttagcttcttgagaattttcagcataaacttcctcagaatcaattgatgcttcatttggtattaatacttcatctgatgatgatgatgattccaatgcttcatcttcttcacttgttgttaatgcattatctgatgctgatgattcatttgataaggaaattggatttttatttttggtttttgatcttctttcaaatttttcaggagtcattttcttaaacaattcaatttttattttcattctttttataccatctcctttacgtttaggtttatttatatccttcactggaacatcatttttttcaattgagcttaaatcggaagaataatcgttgaagtgaggtctttttttatctatccttttccttttaactgggttaagacctttagatttccatcctttgaacaagcataaattttttatagtttcatcaatgtgattgacaattaaagctgaattgacacatttgacctttaagtgtttgaatgaatctttatcaactgtctctaaatcattatacttcatatcttttctttttttataaggtaactttaatgactttccaagattaacacctgaaaacgtaagtgtgtcaagccaaccagtatactttccatgctttttttcttttaaatatttaaatgctttttcacccatgtttttttttgctatacctggaccgaaatatctgtagacttttttataactccaaacggaacgttcagaactaaaactatcaattgtcttgttgtaagtttcaatgtcaccatcggtatacattagcccagattttttgaaagaaatatctttctcatattctcttgctatcattgttgctactccaaggagttccattttacctaccaattgttcagtttgatctgcataaatttttataattttttgaagattggtaattaaagcatcaactgtaagatcatcctcaaacatgacattttgcttcataaattccaacaattcagtatcgattaaatgaacaaattcattttcatcgactttcattgtgtttaagtccctctagttattgagaaactagagaaaaaggaaaagaaacacgtaaataaagagaagatagcaaaaagacatgtacaaattctgatgagccttttattatttttattacgtaatccggatttaaaaattcagactaaaatgactgagccaccttgaattacatttactatggtaaaaattgacttttccctaaaaaactatggttagaatctcctagattccctcattacaatgatactatacatttaatctgtagatgcgtagttatttagttataaacatttgaaaattgaaaattagtcaaaattttgaaaaaaatttttttactatgagaaaaattggcactttttcccacggtgtatatatagaatttatatgaaaatttgattaaatgaatcgattcgaattctatatttatttataaatgatttacacttcaaaaaagaactttaaaaagcaaatatcagtcagaaaatcacaactaacagagtaaaagaataataatttgtataatatattaaaaaatatatgaacttaaagcataaaaaacaaccaaccacagtcaaacaatctattcaaagtcttgtagagtaatttttgcttgttgacacatatttctgaataatccagattcattcatatacagcttcttcggttcatcaaattccacaattttaccttcattcataacgacaattttatcataattaagaattgtatttagtctgtgtgcaatacataaaattgtacaatccttaaattctttagcaattgtttgttgaattttataatcagtttcgtaatcaacacttgaggttgcttcatctaaaattaaaatcttggtctttctaaccaatgctctagctaatgcaattaattgtctttcaccaattgaaaagtttgcaccatcatcttcaacaattttattcaaatgaaatttatgtaaattttcgtcatcattcaattgtttcttaacgttttctaaatcttctttattaattaagccggcagtacttaacgcatgccacaatttatcatcatcatattcatggaatggatccaaattatcacgaattgaaccaataaataaaactggatcttgaggaataatagttaacttacttcttaatgtatgcaatccaagcttactgatatcaacattatcaattttaatctcaccttcaaactcagaaaatctatatagacatgtcataaacgtggatttacctgcaccggttctaccacaaaatccaactttttctgttttattaatacttaaactgatatcttttaaaacatatggaagttcaggtctatatttcattgaaacattttcaaatgtaatttcccctgattctggccaacttggtgctggatcattttctggaatctcatatggtgcttcttgagcaagatcaaatgcataatgattaattctttcaactgagttaaattcattttcaacttgggtgagagctctcatcatcattgttaaaataccggttaaattaataacataagttaaaagtaaacctgttgatgctgcactaatatggaagactgtgaaaacacataacattgcaacaatgaaaacaatagcaaatgcaagaattgataaattagcacctaaccatctttgattaactaaagttaagaagtaagcttcattttgactatcaattaatctatctaatttttgtttaactgtatcttgaactctatatgccttaattaaatcttttcctgataaaacttcattgaaatgtgaataaactagtgatctcttggtagcttccaatctcttaatttctctagcactagcttgataataattagcaataacaacataaaatgatacaatcaaaggaacagcaatagcaaaccatggaatataaataatacataaaataatggtacccatgacattacaaaatgggttgataaattgtctgagttgttcaactaattcattatctagaacatctgtatctttggtaaatctattcaacactctaccaagtggtgaaacatccataaatgccattggaacatgaagaatcttttgggttgcattcaaattcaataatttagaagctgtattggtataataacataataaataaaacattatacctaagcagaaagtgtataagaatgaaaacataatgtaaagccccatgtaaaatgctgttggtctaccctcaaatttatcttcaatccaaaacgttaaccaagtatttgaaaaataattgcaaaaagttgtgataattgcaaaagttaaaaataaaataggggaaaataatttaaatcttccaaaagctaatttaccatagttaagataaacttttaattcaagtgcattaacggctttttcttcatcgccaacaattcttacgatttcatgatcagcctttggaactttatcttcggtggttaattttgacttatttgttaaaacttgattcagttgtaatttgatttcttgttctttaatagcttcttggtcgacttccattggtaaatccaattctgattcatcatctttatctttactttcagattgataacttaacaaatttttgaattttgtatttcttgatttcagttcatcaattgtaccaatatcaacagtactatcaccatttaagaaaatcattctatcagcagaattgaatcaaacttaattgatgagttgccataattctagttttatcctttaataaacctaaaatacattcatcaacaatatgtctaccaactttagcgtcaactgcacttaaaacatcatctaataaaataatattagtatctgcatagacagctctagctaaattaattcttgccttttgaccaccctgataatgtaatacctctttcaccaacttcagtcatgtcactacctgggaattgatcgaaatcacttaataatgaacaagcttcaacaactgcgtcatattttttcagaatcaaatggtttaccaaataaaatattttcacgaatggttgcattttgaacccatgggtaaccacataataacaactcaccatcaacaaaaacatcaccgtgagttcttttcattaaaccagacattgcattcaaaagagatgatttacctgaaccaattgaaccagtaacaacgataaattcacctttcttaatttgcaaattaatgttatgtaaacccataaattcagttttactaaccgcattagcagtatcaatagatttggatagtgaagtaactttttcaatactatcagttgtagttgatcttgaatttgagtcgatattttcatcaccaatgattttttttgaatccaaagactttctacttgatcttttctcctttcctatctttttcgtcatcttgatcttcctcttcatcgtcaaaagtttcccattcaaaatcaccactttcaattttcaatgctaatgtatcatctttaaattcatgaaatttaaattcttcctccttaatatcaccagtacttataaattcactaagttttttagaactaaaaaccaaatctgtagtcatagtcaaagacattggaacaagcataaattgaacagccagaacttgaaataaagttaatgatgaaaaaatatcagcagcagatttagttgttgtgatatcaaatgctgtacagaaagttgccattgaagctaataaaggcattgcaaatgctaaagagactaaaacatttcttaaggattgtaagttcaatacttgtttcatttcggtagatctagcttctttaattctttcactataagaattttcccaactataaaatttgatcattttataatttttcaacaattctttcatcaaatcaactcttatatcagtatatttagaaatgttttttctaagaagtaataatcttttaacacaaacgccaaaaatgactaaaataagaaggaaaataccaataccaactaaagcagcaacaccgatattccagatcaataaaccaatacaaataccaattgggataatagttgttaataagaatgggaaaaacccaattgccatatcaatacgattcatatcagttgaaatcatactttgaactttacttgcagtgaaatcatggttaccctttgcatcaatagataaagatttatcaagtaataatcttgttaagatacctcttgcactagcaccacagatcataaatttatgaaatgcatgattgattgtaatagaggaaaaaaaaatcaagagacaaacaccaatagcataacctacacctttaccaacatttgattccaagccaaaagatttatattcaacgaaattgatcaattttttttgtaataatggatttgttgaatttgcaacatctgataaaattttactgattataccgaaaagataatcaattttcatagttttgaacaagcataagggtataacataggttggtataacaaagtctttcaaaaccgttttatgataatcattatcattaatatcagatattttatttaaagtaagagttgaaggatcaagtttttttttaattaaaaattttctagctgctttcaaaacttcatattcaaaataatttttgaattcattatataaatgatcaacagtttgttcttcattaagataaaataaatcattatctgttaaagttctttgataaccaacttttaaaacagggatttaaccaccagaacatcatttgtgaaacataatttgattttgattcagggtatggttttctttcatctaatgttgggattggtggaacattctttggaaaaagaaatgaaagcattcttttctgtcgtttcagttgaacatcttgttgatgttcaatatcttcacttgatttaacatatgacatttgatactggaattatagtaaaatatgatatcacagtaaattttctttttttctttcaaaacaattaaaaattgataaaattatactttatagtatcaaaaactatgtcttcttatattatttcaaaatttacttgaaaaaaggaatgtagggcctcttttgtaaaaaaattattcaatcaagataacaataaaaatgcttaaatacgtgcaaggcggccgtttgatttgtaattcgtaaataaaaactttatttccttgattttttaacctccgtatatagtgttacattacgcaatcgatgtattaattttctctttctccaaaggggaatttattagttacagaggacttaatgaataataataggttcgatctttagcatataaaactactagttaatcttatttgattagaaagactgtatatattttttcctggatatattatatacacagagaataaaacataaatgaaaaacaatattatgttacataacaactagctcttttatatattgctactcccaaagttatatgttgacgcaaatttaccaacaatttttacgaagcagagcaatgattcaaaattaccttttattacgtaactttcaggaggctcagttattaaaaaaattttaatttgtaataaaaggggggcatgtccccccaatttgtgttgaagggatatttgtaaaaggtagggagacggcagtttttaatatatagtggtatagtcatttaacatcaaaatgtatgtgtttacacattgatttgtcccttttatgctgatgaccttaacttatcacttgggctggatttattataatatgtctgtgtctatgtctctgtgattttgtaaattaatatatgactatcattattagtatgggactggagtggtcaattcaatatagtttggggttaaccctattaattatttaaattgtcatgaattcccaataattcccaaattttatcttattttcctatatttttctcttttgattttactttagtgtaaataaagaaaagtttccctaatatgttacatcaaaaagagaaatctcgtcttgatcccggcattgtcggtgattcatctcgtgcaagagatcaattatcttcaaatgctaaaaatgataactcagctcctcgtaatcaaaattatttatcaaatatagttgatgaaactaaacatttgatgggttttgatgaaaacaaaaatcaacaatatgataaatctcatgaatctcaaacttatcatcaaaactatcctgaagatggttactcctcttcaaatttacatgatgaatcattgactaatactggaagtggtggtaatactattcataaggctggtgattctagtactaaatatgctaattatagttataaatcaatagttaatccagtcgttgatgacagagacattgaagaaagtgaaagaagaattcgtgatttagctcaagaaaagaaaatggccaaacaatatgatgataaaaaagaattgcctggtaaaactcgtagtaacagtggtggtttcttaagaagattaagtattggtggtaataacaaaagtggcaccgcaaataaaaaatattctaatgatacttatgatgatgaatatggttctggaggtactgataagaatgatcttactgatagaagtgtcaatatcaaacaacgtgctggcaattatcaagataatgataattatcaaaatatgggtaataactatgatgatacttattttggtgaaaacattcattctcaatcaaacaatgctttaagagatgaccaatattatgttaatcaaaactatgatactgcacatcaaaaaggtacaagaaataaattttctgatgattatgttttaaatagtgataatgctgtttctaacgaaaaatattcaggtaaaaattatggtacaactaatgaatatttagatgacaaagctcaaacaaatcgtatgggtaaagagtcattagagactggttatgatactggttattcaaataaaggttataatgaaaaggataatattgcaaaggattattctggtgaaacttatactaaagatcaccctaataaaacattagataggcatgatacccatgatactcatgatactcattcaaatggtgaaaatactggtattttggcaagtatttccaattatcttggtatgagtggtaattctgaagatgctgatcatgatgataacattgatgattcaatcagagttaaagatgattactctaagcaaatgccaggtgcacttgattccgatttaaatgattcatcttatattgaagaacctcaatggcacaatactgcaaacacttcaggtaatactgctaactatgatacttccaatactaaaagaactgttaattcaaatcaagattatgatgaaggtttaagtactggtcttgctggtgttggtcttagtggttctggtattaatgctggttcaacatcaaagaattcaaaatataattctaatccacatttttttacttctgattctaaatatgttggtaattcaaatgtcagaaaaactgattttgaacatgatgatttcaaagcttccttattggctccatctggtgttgactctactgaaaatttcaagaatgcacaattacatcaaaaaaatatcaataaaattcaacaacctggtggcaccactggtactggtattggtggtactggtacttttgttcaaaataataatgcaaacgtgcaatcaagaaatttatcaaatgatcaaaatacatcaacctctatgaaatcagcacctgttattgttggtggttctaatttaggtaaaacttctcattcaagtggttcaaaacctgttgaaatgactactgaatcacaaccttatcgcctggttcaaaatcctaatgatgaacaacatttaaaatctgctaatgctgaaaacttgaagatcaaaaacaaatctgcatttaggtgagtctaatatttctactggtggtggatcaaacatgtatggtcaagaaggttatcaatctaaaaaggctggtatcaataataatactgcagttattcaaccaagtaatgcatctaagggcaactcaagaattttgaatagtgattataaaggtatgaaatcaatgaaacaagatagtttaaataccggtaataatttgggtcaacaaaataccaatttacaatctggaaaaaatgcaaatattggtggctcggcttcccatgatggttattatgctggtactaagggtaaatcatcttctcatgattcaaatagtggttcatatgctactgctggtgttttaacacaaaatgttgctactggtgaatataacacatcaggtttgagacgtgctgatgattctggtatgtatggtggttcgggttctacgggtgctactaatgctagtagaactgctggtacaagcgatgtaaataattacaatactatatccactaataagaacaccgatattacaactcctcaaaagaaatttgttagagattctaatggtaaaactgcaaatgttcaaaccgaaaattatggtatgggtggtgcaactaatacctataatgagaataataaatatctttcaaatgattatgatggtaataattcttcaaaacatgatagtggtaatggtttagttaagattaagaatttgtttacaggtaaggataagaaacaaaaatcccatgttgggaagaagaatgtaggtgaacatggtactgttttcagtgataataattttcaatctgatactggttataataatcatgatacaaataaccttggtgcatttactaatgataattacactacttcaagcacttctaacaacatcaatcaaggtcaatatcagcatgatagtagttctcatttgaaaaattcagaaatgacttctaatccgagaacacaaacccattcaggtaaaatgacaggacatagtgcaggtcaaggttatgttactaaaaatgatagtaatggtggtactattacctatgaagatgacggattacaaggtacccaacgtaagaagagtttaattgaaaatattaaggaagttttttaatttattgatgagtttaccgttctttgtctaatgtttttgtattttctgtaatgtgaggtttaatgaaacgaattgatatataatttaaataataataataataataataataataatgaaagttaatactaatcaacatttaaaactgttgtatgcatcattcgaagttcgatgaagcaaagcagtgattacgtaattaaacggtcaaattcaaaacagattgtatctcaaggggcgagaagatcacgatgttgatttaattgctttggatcctccagaggaaggttatattaaaaaatctatcatgaatagaattgaatcagttagcacgaccaaaatgtcattttttcaaacttttcaagaatcaactgcaacaaacaactcaacaaatttcttcatccttgaacaatttgaatttgcaagatactgctgcacaaattaccagtagtgttcaacaaaatatttcaagtttagagaaagaagttaataacttaaagccaatatttgcacgtacaactcgttcattacaagaaaaatttggttcaattgatgatatttctgaattaccaaaagaatataaagatttagaaaaaagagttgataacattcgtcaattttatcaaaatatactttcaattactagacaatatgaaattgaagcatatgataatccaactaatttaaaggaaagtttaaatgattatacatctttattaaatgaaaaaatatcaggtttatcacatgcaactacaactcaagaagctgaagctgttttattatcaggtcgtaaggataaaattccaaagacattctctcatcaatttagtaaaacaatgagtttaactagggaagatattttatctaataaagaagtatcatcaattaaatcaattttaactaaaacttctgatagaaagtcttctgagaatgttgcagctgaaactgcaactgcagaggatactgaaagtaaggaaactccattaactactgcattattgaaaatcagtgaaacagaattaaagattggtaatgaaagattagaacaagataaattaattattgttgaattcaataacaaaattaataatttattgaagcaagattttgttaaatgttcaaccttaagaaatcaagttgaaactgctagattaaatttcgatacagttagagctgaaattaaggcattacaaagtggcaatgcagaagctgaaattcctcgagcattgagtaagaaacttgaggattgtgaagatgaattagttaatgcaactgaaattgcagttgaagcaatgaaagaattaattaaaccattagaatctattaatttattaaaattattattcaagattcaactaaattaccacaaattcgttgttagtgaattaacatcattagttgatggtttagaaaatattccactagatgatgacgaatgatagtattattcttaacatatcatgtgtatttaactttagttgttgtttatttaccatttttcataaaatataattctgtagaaaataagttttaattgaatatataaagcgatatactagaatacataggggtattgacacattctttttgcaatgattacattaatgtaaaccactacaagctccgaaggctttgttaacattgagaataattgctaatctattgaaaaagatctcagccaaaagcaaggcctaaacatatagcaaaaaagtataaaacaacgaaactcatagcagcaagcatgattgcataaccaaacataacaattgtaaaagctaaaaccaacctaatgaaatcttgataaagatcctttaatcctatattaaacaatttgctaactaacttgaccaaatgttaaatttgattttctaaatgcatctggaactgattttttattaattgagtcttcaggaccacattcacaatcttcttcaacgacaattgtatttgaaaaattgtggaaaacttcttgttcaaggtaagaacttaagaaaattaaacctctgaagaagaaacatgaaaagaataaaacacagaagataccaaaagcagcaccagatgaatgtgcttctaaggttttgaaaaaaacaggagcatctttccaacgagtagtcatccacatagtcatagtcattgagctattaccactcatatccataccgtccataccatccatactggacatagttgacatacttgaagttatacttgtaatagttggcatactcatacttgccacacttgatgtcatactactcatagtggaagacatatctgacatatccatacctgacatattcatttttgtttccttgataagttttgattaattgatgaataagttaaatcaacaattcataattaataaagaatatcaactctataagtacaattcttgataattgactcaacattgaaagcataacaaaaaaaatgatttttctgtcttcattattgttaccattggctaaattaatttgctcacttttacccttttcagtgaaaaacttctcatttttttagaggtccaaaaatttacaagattctcaagtcacccgccgcaatcccttgagatacttcttgccactgcgccacatacactgaaccttcatttatactctcattggatacataagtgtctctaattgcactggttataacagggaatgatttatctggtataacaaccatttctttatcctcccccaaattaccccttcttgtcaaattcatctttttcaaaaattgctcttcaaataaatcatgttgcatagataaatgtccttccatgtatgtgatttcatcattatttaatttatccttctcttcttcatgttcttgaatatatagggcatatttatcaatttttcttagtcttaatctaatatatgatctaatcatgaattgaattctttctagttcactttcaatcagaacaagtattaacttaatatctttttcctgtgtttgtaattcaacattattcatttcaataaattctagttgtttcctgattctttcaaacattcgtttcatcaactcttcttcatatggtaaaatagtgcgtaccatcttttcattaatccaagcttgctttaatgtttctaagtcacgtctcttttgattttcaagatgctcagtattataaatatcaacacgtttactttccttcaatccttcatggaattcagcttcaaaatcgttaataatatcattagctattctgtcttctctttccgcttctctatctctatccattttggtcttccttttcctaactctttatcaagaatctttacgagatatcacatttaaaagctgaaacaaaatttaattacaatacgaaataaaaacgcgaggtttaatttttttatcttccgggttttgacaacttgaatcattaataggaacagtgacaaaaaggcaggaggcttgtttaatgtcacacattcaacatgaatgaagaattattgtcaactggatctttatattctaataatgatgaatatgcaaaacaacttaaaagaaatttagaaaagcaaataagggaagaattagaactcaagtatcaaaaatcttatgaaaacacgattaataaaattaaatccgatttaatggaatcacaccaaattacttcaaatttcactattcaacctgaagtctctccaaagaatgaagctatagaattggtcattccgacaactaaaataaaagatattgttttttcctctgatttccaaataaatgaatcaaaagaatctaatttgttgctaacactacatgatgatttgatatgtatatgggattatcactcaaatgaattccaattgaaacatcagataaaactacattcaaaagtaaatatggcaatatttgatttacaatcttcagataaaatatatgctgcttcggataatggatatatctactcttacacgttatctgattactctcatacacgaactcaaattcaattatcttctttgattcttatttatcaattatcaatacattcaattattgcatttacagttgatggtgattatataattctagcaggaaatttagttgatgttttgagtccgccgttaaatatcctttcatctcatgaatttaaaaaggactatcaacaatccaaatccaaatctgttttaataacaacttgtctgatgataaactcaaataatctagtaattgctctgttatctggtgaagttttgctagttgatttagcaaataaaagtatatcatcgttaaacaaaccaacatctaatccattacctgcagttttattatcatataattttggtaaattattgatactaggtttagaccactcaattaatataataaacatttcaaacaaaattaaacttgttgatacccttataatgtcagagttatcattttctgctgattggattgatcataattcaattttaacatgctctatccagaatcaagcaacaatttggaatatcgataataacaaactaagaagagataaagttattgatttatcaacagtgggtatagatgaaaagcaaaatgcaattttaatgaataaagttaaaccaatgatttctatggtgaaaatggttgatggtcatgtcatagtaggagacttgggtggtaaaattctcagtactaagataattaagtaaaatgtttaatgtgtataaataaatacaaagtgttctaatgggttataaaaagttttcaaaaagggaattgttcgattcaataacaatttcaccaaacaatctatcctgtttcaaagtgacatttttagctgtacctaaaacaagtaattcaaaaaatgttcttgtagcattactcttaggattttctgataatttacatgtgtctaaaacctctgtaaattcaagttttttatcatgatcatgtttgaaaattgttcgaagttcttctgcaacttcaactgttgctttgttttgagcgttcattgactcatattcaccatcataatcgttttctttttggacctctatattgttttcaccattattatctaattcatgtaactcttcttcttcttcttcttcttcttcttcttcttcttcttcctcctcctcttcgactccagttgctgctggttcttcttcttcggcttgaggaatttcagggatggtattgtcaaattctggtgattgttgatccaagtcatttaatatatcttcttgttgataattatcctcaatggctggtaattctggtggcatattatcagtttgtatttctccttcttcagccaatacagttgatccctctatttgataactattttgattcaataaacgtcttcttttaatagatttccatgatgaaccaactaactgaagaaagctaggttcaagtgagctcataactttcatatatgcattttctttaaatttatcagaaatatcagtagatacttcacgtaatgaagcaggatattcagtttgtcttttctttaattcaattgaaggaatttcattagtttgatcaatgactaataatcttctttgagttcttataacgtcagtattcaatacatcgagtcttttactcctatttgatttatttcttggttttctaactctactagctctttgttcctcctcttcatccctattttcttgacccatgtcaatatcattatcttcaaaaactgtattatttgctgttgctgcatcttcattatttgtttcatcaatggtaaattctaaatccatgttatcaattgctgatatttgaaaatcactaattccagcaattgcatcattaattctatcgttatctgcactgatatctaggtttaaatcatcgttgttaatatttaattctggtggttcatcaggctttgttcctaaatctaaaggtaaatcaaaatcaggtgcaccatctaaatcatcaacttgtggtagagctcttctagccaaagcatcaattgattgattcgcataatcaacactatcatcataatcaaccacattatcatctatacctacactatgattaattgtggtttcattatgcatattatttctaccaatactgatatcaccatcttcttccatcatggtatctgaatttgcccatctttgggtatttgtgattgattgaggtatcccaaaaatactattcaaattaaaattatcgttatcataaagaatattagcttcagtaattgtatcctttaatgtaatattctctaaagatgatagcactgtttcttcaataggcaatgtaatagatttggaaactgcaaatgctgatcgaagttggattaaagctaatgaaacttcctcgtatagataacgagtctttcttgaataaattttaactacaccatacaataactgacttgatattctcaaaggcattacatcaggttgtttttgtgctttcaggcttaacttcattattttctatttgtgtctcaaatcttagttgagattcagaatcacctggttttaataaaactgattcaaatgaatttgatgcttcaattgcacgcgttgagttaacgatagaggtctttaaatattgttgtttggttaattttttctccaaacttgcggccagccacacgctagcaagtgggttgtcaccatatagcaaagatagatccggtgcagacattatttcttgatgtttttagaaaagaagtgtttgttgttgtcaatatcaaattttgtagccctgaacttgtattacagctttaacgcgttacttgaaaaatggatttgagattacgtaatgttgtaatatgatagttcacaaaactgatgtggaatcgaatctatatattcattttggttcttttatggtacatattagttgatcttacattcaggtagtttacttcatgcaaagagtttgacattcattagctggaatttaaaatctgaactacagaactaatatgttatttgtttgatgtattacagtcactggctagtgaattcataacctaaattcagatgagtgaattcatgattttatttggcaatctagcggcaatatcattgctaccaatctcacatacataaaaaaagatcatggctaaatagtcaagattagttcacaacaatactcaagctcttcttctcatataacattgcttcaacatctcgcgtgcctctaaatttcctttttgggaatcttgtgtttccctatttgggaataccttgtgaatagtataatcaattacttaggtggaatagctgtttgattaacagttcgatttacatctccttttttagcaacactgtttttgttgttttctttgcttctatttgagtaaaccatacttcactcgccggtttattcttttttaccatgaactcgggtgcccagtttccaattcatggtactgaaattaatgaaattagtgatgatgatgtcgatggtgataatttatcatatgattcaattggctcagatagatcatatattttaagaatgcaaagtcttggtattattccatcaatgatgttaacaaaaaatacaacacaacaacagaacaacgacattgacaacgaactccctagtgctttttgcccagaggtgatacaaacccgacaaaaaagaaatcaattacccacaattgaatttctttgcaatccaaccaacacaccaatccatgaaaatgatattgagaagaacagaaatcaaagtgatgatcaaagtgactttcaaagatctatcatcaacgacagtagtgaatgttcttcacttcaagctaattctcttgaattgggatctttatttaaatcaaatcaaaatctgggagagttcacttggggtgttagggctcgattatcaaatgtaagaaaatgttacacacctgaaaataaagagctacaaaaatatagcttatttaatcattctctttatagagtcaaaaaaccgacacattcacaaatacgaaaacaaaatgaaatgaattccaatcttttgaaactacagtctggcacaattaaaagtggagttataaatcctcgggtagactgttcttcaaagccattcaaacgggaaacgcctgaatatactgaaaaatcatacaacagggcacgtaaatattgggcatttattaacaaccaaaatgctttcaagggtttattaaaggttgaagaatctatgcttaaaagatatgggttgaaacctgttgaaaaagagattattaagatgcatatagtagcatcattgctgcccaactatgttgttgtagataattttaataattttcaagataaagatggctgggtttatgaaacgagtgacttacgtgaaatgagtgaatgtcttagtctgagatggtgtggtcaaattcaaaacttttataaaccgtttgttataagatatcgtacagataaatttggaaaacaacaacttgataaacaagcactatgtccatattgtccttttgaaaaagatatgaattttgacaatattttccatcaaatcgcaaattcatcatatttacatcacgttacaaaattgcatggtgtttatagtactgggtatgaatttgctattcctttttttggtatggataaaaatgatgtctttgcggtctgtagacactgtggagataaatgtaaactcatatttcataagaaaaatgatatactgagaaactgtatgatttcatttaatagacatgttctgactttccataatgataggagaaacaggagaagtcctgagaggattagggaagatgaactgaattttgaaaagcataaagactttttagtatatgaagcacttgaagatgctttcggttgatagcaaattgttataaaaaaatttcttaattaaaaactgtatatctacattatatataaaatacacaaaacgacatgaaatacaaaaaaagcaaaggttatcaaaacaaagttgactttggattattcaggtttatcaattttgaactcttgttcagcaaatgtaatataatcatataatggaactctaggaggtgcatgatcctttaacatccattcgcctaatgattctttgtttgtaagtggttttaaattatcaataatattaggatctgataaattccaagtattatcataaagtttcatttcagcttcatgagcatgtgttaattctttattgtggtaaacttcttcaaaaatgttgatgaatggttttttttcagttttaaaatataccggactttttgacaaataattaattacttgtgattggttcttcaaatttctttcttcatccataaggtactcataagtatatattaaatcttctgatgtaatatcataaattgattgtttaactaattcataaaatactttaacttgattttctctatatgttggacaaacttcacgagcttcgatttgatcatttttctttatttcgttaacacttttatcaggttttggatttaaaccaattgccagttcagcttgtagtatatcataagcgtataaccaagctcttaaaggtttggaaaaatgataattcttatgttctgtattaaataatgcatcatgagcatattcaatttcaacttgagatcttaatgcactatcattaacagcaactaaagttggagcaccttcatataaagtgagtcttaatggagaaaattgatcataagaataaaagtgacggtttctacagttgaatattttatgttgtttatgaatatccttaacagatttttcaagatttctcttttctttcctttgtttatcatctgcatcattcttattttccttattatcataatttttcttggcagcttcaaaggattccttttctttttcgaggttttctttctcaattttaagtaattctctctctctttgaagtttctccttttctgctctttccctctcatctcttaatttataagctctctccatttcaacttccttttgtcttgattcttgcagaatattataatcaattttcaattcatttgaaacccatttatcaaattttttcaaataattttcatccatttcatcctcagatacacttaatccagtaatatcaatatacatacctgaatcaacatcaataattctggcatcaataatattattaccattacccttttctcgatgtgtaattgcagtaccacaatcaacatatcctttagcagttccatattttggattttcaacaatcattgaattattatatctaagacaaaattccgctaaatctccaattggcatttgaacatctgcatcttcatcccatggaaatgacattgaattaaaataccatgacaataatgtaccgtgtgcaggaattaaaaataatccatcattaaatgtaactgtaaataataaatgtgataaatgtgataaaattgagttttgaatattaggtggtgtagcagttgactttatttcagaattattcaggattgatctaggattatgaattgaaatttcagatgttggcatttcacttataaatccagcaaagaatcttgaatcataatgattaccattttcacgaactttatgacctctgtattcatgatttggagtgatattaatttcatcaagatatttaggaatatcttccgttttcatttggaatgacatcttcaaactatttttaaaatttagttcattatcttttagtaaactatcatctgtttcaaataaatattgatatttagttgcaaaatcaacatcaaaattttcctctggaatatctatttgataattcattatcattgttaagtctcaacttaaaactatgttcatgctcaatttcataaaacttatttaattttgataattgatcaattaggattaaaaccattatatgattcacttgacaaaaaacttttcaataaaccatttcttaacattgaagatgattgctttgtttcagctctgaaatatttaccattatcagttaaaaaataaatgaaatcaggttttggtgcatatgataataaataagacttacaattgtatgctttacccataaaagttgaacttttacttaattttttttgaaaattaaaacctggtgaataacttttttacttctaaatttaccctcattggttataatataatcctcggtatctaaacatttactcttcccaaccatttgggaagaaggagttgaatcattccattcaaaatcaatttcatatttatatttatcaacaaattgcttacaagttaaagattttccatcatctaagaattcattcaaatatgataaatcaacccaagtcttcccatgaaaaaggaattgtagctgaattttcagaatattgagtatttaaataatttaaataaacagataatgttataattggatcatatagatgttttgattgtctaaattctaaataagatttaatatatttttcagtctaattctgtaatcaatttttgaattaataaaatggctagtaaattttggatttaaattatcaatttttggatttgataatattttatatattgaatttataattggggctatggaagtctcattttgaattgttgttctattatagaaaatttgagatggagttattagataagaaaaagaattttcaaacgaaattccctcaaatcttgaaatactttccttatagagataaaattgatcattaaacgagtaaaaaattgaccctaataaacctatgaccagcaataaggatattgaagcaagtttcctccgaaatcttaaaggtgcaaattgatgaagcatattcgtaatttgaaaggttgtttgatgaacgatgttgagttaaagtagtgtaatgtaattttataaggtgtaccttgtgattcaaactaaaaagaatcgatgcggtgataagtttttgaagtgaatgtccagtcaagggttagttcagttaattagtatagtataaaaggcttttcttggttcaaacgatagagaagaagaatatttaatggcgggctcggaaaatcgaagctatgtgtagctagtggatatagatatgcgggaaagcaagtaatatattgtttaaagatataagaccctgtgtaagttataactaattattaatgtaaacggaaatggtatatacattcatgattatatataatgttatttggtcgtgtgaatagaaacctaatttggatttaattaattaattactaataataatattttccgcatcgcttttatcacttagaaaaagaaactttttttttcatttttaaattttaaactgttttctattgttggaattgtttttcttttaccgctttgggatttttaattgcagatttatggatggaggatgtcgtcggtattgatgataatgcattaaggtttcgggaattttttacattatttatttattttttattgattagattctggtagcaaaaaaatatatagcttaattacaatatataatgtgaaaagcagttgtaaacgttaacaaataaaataaaataaaataaaccaaactaaattaaactaaactaaattaaaagcagcgttataaacaaattgggattgctgtagtgataaaaaaggagtgaatttaacaccctgcgcaatccatattgagtaagtgtaaagaacagaaaaatagggaataaataacattgggcaaaaataataacgaacttaattagtatttgtgatatatttatcaattgatattaatttgattcctgatttttaacgggtttgaactcttgttctgaaaaatgtatgtaatcatataatggaattcttggtggtgcatgatcttctaacatccaatctcctaatgttttcttactatcatcatcaattaaatcaacaaaatcatttatatttggatctgttaaattccattgatcatcataaaacatcatttccatttcatgtgcatgtgttaattccctattatgataaacttcttcaagtaaattaataaatggtttactttgtgttttataattgaatttcactctctgaaagatagtcaataacttctgattgattataaaataaatcttcctcatttgataaatattcatgtgtatataatatatcctctgatgttatatcatataatgattctttaaccaattcatagaaaacttcagtgtgattttttaaataagttgggaaaatttcagatgcatgaatatttttctcttgtaaaacatcttcaaatttatcattaggtttgggatttaatcccagtgaaatttctgcatgtaaaaaatcatatgcatgtaaccatgctcttaatgctttggagaaatgataactttcatattcagtattatttaaagcatctggtgcatattcaatttcaagttgtgatcttaatgcactatcattagctgcaacaaatgttggtgcaccttcatataatgttaatcttaatggtgataattgatcataagaataaaaatggcgatttctacaattgaaaattctgtgttctttatgaagatcaagtgcagttttttcaagactccttctttggggtttgttttcttcattattatcatcattattattatttgaatctttatcattgttgttcttttcttgttcagccttttgcttttccttttcttccttctccttttcttccttctccttttgaattctatctttttcagcttttgctttttcttctctttctctatcggctttctctaattcaatttctctttgtcttgattcttcaagattatgataatcaatttttaattcatttgaaatccaattatcaagtttttttaaatcttctctatccattgtatcttcagaaacacttaatcctgttatatcaatatacatacctgaatcaatatcaataactcttgcatcaatgttattattaccaatacctttctctctatgagttataacagttgcacaatctacaaaaccttttgctgtaccatattttggattttcaacaatcattgaattattatatctaagacaaaattccgctaaatctccaattggcatttgaacatctgcatcttcatcccatggaaatgacattgaattaaaataccatgacaataatgtaccatgtgcaggaattaaaaataatccatcattaaatgtaactgtaaataataaatgtgataaatgtgataaaattgaatttttaatatttgcaggtgttgcagttgattcgatttcagatgatgattgatttaaaattgaaattggattatgaattgaaatttcagatgtcggcatttcactaataaaaccagagaaaaatcttgcatcataatgatgaccattttcacgaactttatgacctttatattcatgttgattgataatattaacttcatcaaaatatttagaaattttatcaggattaatttcaagtgaaatttttaaactatttttaaaatttagttcattatcctttaataaagtatcatctttattgagaagttctttaaatttggtaataaaatcaacatcaaaattttcctctggaatatctatttgataatcattattagtgttaagttttaatttgaaactattttcattttcaatttcataaaatttatccaattttgataattgatcgattggattgaaaccattatatgattcacttgtaaggaaatttttcaataaaccatttcttagcattgaagatgattgttttgtttcagctctgaaatatttaccattatcagttaaaaaataaataaaatcaggttttggtgcatatgataataaatatgatttagcattatatgctttacccataaatgttgaaactttatctaattttttttgaaaattaaaacctggtaataattttttacttctaaatttaccttcatcggtaataatataatccattgtatccagacaattagttttatcaacaagtgaagaagaaggggttgaatcattccattcaaaatcaatttcatatttatatttatcaacaaattgcttacaagttaaagattttccatcatctaagaattcattcaaatatgataaatcaacccaatcttcccatgaaaaagggattgtagctgaattttcagaatattgagtatttaaataatttaaataaacagataatgttataattggatcatataaatgttttgattgtctaaattctaaataagatttaatataatcaatatctttattaaaatctatttttgaattaatgaaatgattagtaaatcttgaatttgaattaacaatttttggatttgataaagatttataaattgaattaataattgaatcagttgaattttcttgttgaatagttgtaatattattaaataattcaggtggtgtaattaaataagataaagaattattaaaagttatttcttcatttggataaatgaatttttcttctaataataaaggattagttattgggaaataaatagatcctaataaacctataacgaccagaaaacatatagacaatagttttctacgatatcttataggtattaaatggttaaacattagtataaagccggttatttagtgtagatgaggttaataaataaaataaggggaaaggagaagagaacaaacaaaagaaagaagagaagaatagaataaaacatacaacaaacagtataacaatatccaataagcagataaaaatatcatcaatatatcagatatatcatcatactttactttaaacagaaattggtcgtgtgccttacaaactggaaaataaagttttccccactagtggaaatactgatttgagagcggctaccctgaaggaaataacccagttagtaccttactacaatacattattatagcatgaaaaaagagaaattttatagtaatgtcagggcccaggcggtgtcataatgcaaaatgtgtaatttttggtctccagaattttattatcatgattatctaagatgatctttattatctttattatcccacagtttttctagaatcctttcgctggtttactctcttctcagtggtcaatcccagtggcggataattttcgggtttatttacaattttattttttatacaaaaacagacttttcatacaagattcgtctaggtgcatagcagtgtatatatgtactggtttgtaaacccttgaaatggacgtatttacacaaaattacaaacttagataaattatatatccagaatcgacaacattaaaagtgcagacggacatatttgcttttttttttccttactacaccgggcgcggaattagcacttaaagccttctgaagagcaatgttctgtgatttagttatacatagcattctgtgaatgactatataaagtgaactacttctctgctgtaattgtcagattctgtactgtaattaaacagctcctataaattaaccaagatgtgtgagttttttggggataaaatgctaaatgtttggtgttacacaccaaagtttcttttttaaactaagtgtttaactaaattatacatcattttaaaatgatttttgataataacaataatcatcatcatcactttaacggtgaatcgggagatgaatgtgatattgaaattattactcaactcttaccttatactttggatttaaataaagacattgatgatcaagatgattatgaagctaatttatacaattacattactcattatgcagattatcatgaatctgatgatgaagatgttttcaatgatgattcatcgatttataatgataatttctctgatgattgtacaacagttgcaagctcagaaccattattagctgatttttttgaagagagaagattatttattcaaagtattagatatttaactgtaatggaacctttatttgctttacatccaactgaaggtattacttatgattatgaaattgatcttgatagatttgctgatattaataatagatttaatgcactttaccattttagaaatgaacttttagaaatttatgattttgattcaccattatttgatttaccatcattagattcccaaaatttaaggaatttaaatcataatcataacattgataatattaataatttgaatagttccaatgatgatgatttaagcattgaaactaaatctgaaactaatagtgaaactaaagatgagaacgaaaatggaaatggaaatggaaatggaaatggaaatggaaatggaaatggaaatgaacctgcttttgatcttgaagctgagtttagaaatgcattagctactagacttgattatgatgatgatgatgattatgataatgatattgattatgaaatagagcaattagatatagatgcacttaacataggtgcctattttccagatttagatctaaataatttatctgaaatgtcaaatactccaaacgatagttatcaaagaactctattatctacatttgaaaattattggtctcaaaataatccttcaattattaatcaaccagataatattacagataataacatagataatacattagataataatgccgaaaatagcactgataataacactgatgatactactgatgctattgctggtgaaataggtgaagatgatatttctgtaatctcactttcctcattttatgatagaatcttatctacaaaataaacacagtacataaataaattcaattcctatataatatataccctaaataataataatgatgatgaacaactcttaactgaactttaacttatgattaattgaaatatacttctgattgtgtagtttgatcgttcttatcgtatgacaaataatgtagaccctattttttttaaaagggtagcacccgagtttcgggaatatattagacgaatttcttaaaatcgattaagttcgtttgagtctcgattctttgttggaactttatctatccggtcgtttatcttaccttttttgattgattgtaatagtctcccatgtattacccctcactctacttcactctgttggaatctgacagctgaacaattaaagcatcgaaattaatcattttttcagctatattttatgtgtaattttacattttcatagatttgttctctttaaaatcaatgctatgtaacaaaacagcgtaaacccagtattttgataaaaataaccaaactgaaaaagttagcttgacaacagttcacaaattataaaaaaaatttttaaatgcttaaattttgaaaatattacttgaaaaatctaaatttaaaaaacattgccaaaaacaataaatatgtgatataaataaaaaattcataaacaaagtccatatatagtgttgtaatacaatataaaatattaaaaaagcataaattaattattactcaagcttttttttttttttacattaatttcattaaaatatacaattttatacagattgattacttatacgcatatattattcatgcttcatcaattcaatatatcttcatatactgaactcaatgtaaattatttctattaggtcattctttaacctttttcttctaatttagatctaataagaactaaatttttcatatttgaataacaaatatgtatctttaatatatctttttgtaatcttaaactctggatcattcttcttgcttttgtagcattttttgttgaaaaatacaattaacttgattattatatttgccttataagcatctttctttgttgatattaaaccaacaatattctttagatcaatttttatctctaattcttttagaattacttcaattcctttacatttgaaaaagacatgatgagtcccaccttccccttcgcagaattggcaagggtgataaaaatgggaattcaacattcctgtttgtaattcaaataattcattaaaatcaacatggttttgattggtgattctacccaaccaaccaaagcatgtttcccaatccagttgatggtctagtttaccatcccaataatcagcattaaatttatttttaaattcttctttgtaaaatcttttagaaaagtgtttaaatgattcaacattgatttcctgattgttattgaaaatttctacaattttccatttttgaacatttttttctaccattgaaaataacgatgttgtattgaaatctgtagtttctttaacctgaaaatctgagtgaatattagttaaataataccatccttgtaaatatgggaaaatattggagtacaccattaatggtgctaatgtttttgaagaagcttcatccatgttgtaattcacagggtgttcgataatgaaattgatatttggttcaagatcgattattattttccctgtatttacatttattattttaggttttgcaacctttgacatttcatttgaaagagtttcttcaatagtaatattacttccccatattttatgatttttatgcagaagaagactgaacggatatgttgaaattaatccatttgaaatagtgcctggtatttttatttttggtaaagttccaggtacagctctatttgttaatatgtaattttcgacatatctataataacaatggtatgcataatgatttctgatcataacattaataattccttgtaatgagtgtgagattattaatgtcaaaggatgttcatttataaattttaaattctgtttaatagtcgttatgtaaatgaaatatgctcttctaccttgaagttgtttaccaaggtcgatcagacccatacccccatttttgtgaggttgatgccatttgattcttctaactgcaattttcagcggtaaatatttaactaattcttttttaacataattttcaaaagaatttaaaagaggatccggaattggatcatgttgatcaaaataatagatagtggaatagatgtaagtattaacagctactactctttgatttaaatttagatctaaaaacatagttttccttagtcttgttttcaattggtttattttattgtaccagttgattttcaacaagggaattcctagatagataggattttctttgatatctaaaattgatagcttcaattgatttatattagcaaattgtttgatattattgatacctttattattaataaaaattattgatttcttttcatttattttaagatccgaaatttgagcaaaattatttaaaattgatagtgattttaatagttcattattgttctggtgaaacagacatatatcatcagcaaaagctagaatattgataaaaagcttagcatttaaacctctctcattgtatggattgtatttcattcctctaattgattgatggagtttaataatcagtggttgtattgcaagattgaatatcaggggtgagaaaggtaaaccttgtcttacacctctccttaatggaatattaaatttatggatccaattttgattaactatattagccgatgctaacctagattggttaatagttgcttcaatagttgaattagggaacccaaatttttctaagatctttttaagatattgatgatcaatagaatcgaaagcttttttcaagtctactaataatatatgttgttcattggataatgatggtgatgaattgatttgattagcaagaatccttgcagtttcaatatgtaaatgaatatttctgtgaagcataaatgcttgttgatgatgggaaataatcctgtttgcaataggcattattctattagaaatagaaaagttgattaatctaagtgatgaatttgtaagactgataggacgtagatcatctattaatggaagatcttgtcggtaactctttttgggaattaattttatcaatactttaccaatcttatcagttgtggttaaattgccttgaagaatataatttgccatgttggttagaatcacagcagcagaaacccagttgtttttccaatctctgtaagtaataccatcagtccctggtgatgatggaccattttcatttagccttagaaggtttttatatatctcttgttttgaaaaaggtttaattaaatcatttttctctttctcagttaattgttctttaatattttcagtgaacttgtcaaatttgttatttaaattttgatttgaataaatttcatttgatgcgaaaagatttgaataaaatgaatttgcatcatttataatattttcatccaaatttgcttcatttgaatgttttccaaatctaagtctaagtctcttgaagttttttgagagattagctgagatattattgaattgaggatcattaaaatcaaatcctaattctttagatgatattttttccttatatgaaggtaaatgtttcattatctgaattactttatttgttttccagcaaactctttgcatatatgcattataatccattgatgggtttttagtatccagaatctcattggtgaaaatgtatttatataattgtttattttcaataatgtaatcaggaattgatggtattcttttgtaaaaattatctttattaattatattattattagaatttgaattgatatctgataatgtacatactaccggtctatgtgttgtaaacggtagcttttgatgtactctatatttaaaattgatatttcttagcagattgaaggaaacatggaaacggtctagccgattatttgttccatttgaaccgtggttggtgtaacatatacttcttctattatttggaaggaagaaaatatcatataaattattttccattaattgttgatgaagaaatgattcaatacgatttaaatttgttgcttccataggatgtgtattccaatcaccacaaatgattagattattttcaccacgagataatgatgataaagttggacataatgtgtcaataaaatcttttttgttaatgcagtggaatctgttatcattaacattattgtaaactggtacataaacagagatgatagttaagttttcttgtttgaaatttattgttatatcacagacataaaagtttgcaagttgattatcacgattatgccttggaaaaatattatttgaaatgatttctattgaagaatggtaaataattgctgttcgatgttgaacagattgaatcgcaattttgaaatcgaaattggataataattgttgaattgaagataattcagttgattgatttagatcaaattctgtaagacacataatttgaatttttttattttttgcataatttagaatatgaattaatttagaaggactagttgccttctgaatattaaaatttaaaatttttaacttattcattatgatattttatattttttttttaatttttatatttttatattttattaaacttgaagaattaaatgaattagacttgtgagtctaaatccatttgagatttctttttttcaagtttctcttttctttctaatgccatttctatttttttagcatctaataatgtaccagttgctacactcttaccttgtttagaagatttaactaatgttctgacatttctaggttgagttggagtttttggcatacttcttgtagtttcggcatgcttagtttcaacaaccatatcttctatctcttcatcactatggatgttttcatcttcatttggaatttctggatcatccacattttccaatacttggaaaggattgaccgcattatcaacgttactgactattgatgatgatgaatctgacctagataagttcttaggtttagatggaatagagaagccatctgaatctactttgtcattattaataacaacagctgcatctagatttaaaatgtttgtagaggtttgggctctacttcttttcccattaccatttgtagttgatgttcttggagtaacaggagcgtaaaatacttgatcattaaccgttgcgtttctaattctcaatgcccacattggtaatgatcttgagagagtttttttgaagaaattctctcttgtttttgggtggagggaattaaataacctttcttgttcagcctccgatgattttggacagaaaatttctctgtgaccattctttggaatttcaccttctttgaccttatgtctagggttgtaacatcttctacaacttggtttcattggacatctagctgtagtgtggtctgtacatctgcagtatacacaatgtgtaggtgcagtagacaagtaagtgatgatggggattttatgtgtttttccacctgttgtgtgtgagatggaatgaattttaggtggtaaaactgatgattttagttttaacactgtgtaaataattttattttgttcgtagaacttcatattgaatgccattttggattctttttcttgtggtaattgacaagacataatttctccgtattctgaatagagatttttaataatttcatcatatttagatttaatgatgaaaggagggaactccgtttttaaaacaacaagtgtgttgttttcttcaaaagattgatccattaagttaagatcatatgaattaaatgtttctactaacatggtagaaactaattgtaataattccatcggtggttcagccaatggtaggttaatttttaaactgtatttatcagtattaaacatgtttgcaccttcttccattgtattctcagttggtgcatcaattggtttgctcatattattatgaactttgttgatttttttatttttaataatattattgttgttgttatctttgcttttgtaataatcttcaaagataaattgaaactctttgtgcatttctgctaaatttgtagtattaatatttctttctaattcttttaagaaagaggataaaatttcttgtaatttttcaaggtctaaaaattgatctttgccaacttttagaaagtatgaaaggtgataaagatgatctttatcaaccgtaatatttgcctccgtaattgttttatggagtttttgagccaacgtcatggttggttgaggttctgcatttacctcttggactacttcatcttcctcagcgcaatcttgaaattcaatatcttcatcttcgtcttgagtttcatggtcagtttggttcaaaccttcgttttctttttcttcagcaaagactgaaggtaacttgttgaactcaccatggggtaagttgggcggtttagtaacgttttgagggtcgggaggacctgaatcgtcgattgtagtagcttttagggcccctttttcaatcattttttttttatttttatttttatttttttatttttatttttattttatattgaacaacttgtatttattcccttacagcacaacaacagctcttatggccaagttggtaaggcgctacactagtaatgtagcgatcctcagttcgactctgagtgagagcagttatttttgaatttttctacaattattgattttttttaactaagagtaacgcgttctgtatataacgtaatcatcaaaatttttaatagtatcacacaattcaggtacaaaagaatctagaacaatttcttgttttaaactatagttaattttgattttatttttattccatcttatctaaatattacactcccacttataaaagcatataagaagggtgtctatgacgttatgtgcgatgaaatactttttataatcaaaagagatgaagaaaaatcagattcaaacgatgatcaaacttcatcttcaacttcaaattctcaatctagttcaactatgagtagtttaaatgctgaacaatcatccgttgatcatttattagattctcatggatgtgttatttgttcaggagcaccagcatgtccagaatgtaatagtgatgaacaatgtacaatgacaactcaaacatgttttgaatgtccaagaacttattgtgttagtatatctgaggcttataatgttactgaaacaagaaaatctttatcgagtgcagaaattggtggtatagctggtggtttaagtggatttttctttatattgataatgtctggtttatattattgttatagaagatttaaacttaattccattagtgattttgaatatggaattaatgaagaaatgaaagaattaacaaaatttgttggaggtgatggtgaaacaataaacgaagaaattaatgaaacttctgataatgtaaataagagatactcacaacatagtttatcaacaatgacaaattctgttttgactaaagcttctaatgttttaaatattgtttatgttccaggtgtgacaagtagtagacctactaagccaccaagtatattaagtggtagaagaaatacaagaaaaccaacagcttcaatgtatagtaagggcatgagtgtttattcaaaggagacttattttagtgatttagagaatgcatcattttatggtggtagagttgccatgaaaggtggtaatcctacattagttgaaattaaacaagatgattataattatgatgatgaagatgatgatcgaataatacttgaagatgatgaagatgacgaggatgatgattattttgcagaggaacacgaagaaaatgaagaaaatgaagacgaagaagacgaagaagacgaagaagataatgatgatagaggtagtggtattcttccaataaacattaatttgaagatacctaaacagaatcatgtggaagaaccattaaacgaggatgaaataattacagacaatccattcagcaatttgaatcgtatagatgaaaatgaaaatacaatagataataactcctttgctttaaatataggtatacagggtaaaaccaccgaacgtactgttcctaatagatatgctgcattgattgaaaagaaagagcaaaccaatcaattgttaacgaaaccaaataatgctaataataatccaccatatatcttaaatagatcattgtttggagaaagtgattctaacagtgaaagttcatcagattccgatgaagaaaatatcgaatatttactacaaaacagtgatataggaaccggagggggcaatacccgttctacaggaagcaataccacctatatcaatggacatagtgatccattctcatcaattcatgattaagttatatatcattacgtaataccaaaaatagcttttttttttccattttcaaagttttcattctgtttgttttgttttgtttttgtttgttttcctttctcgatttctcaaatcatcatgttgtagagttgcaatttacatatatcttgaattattctcccctccttttcagaattttgtatttttagtaccttacaacaatcaatcgcctgttccattgattttgcagagtaaactgggtatctcatatttggaaaatcaaagattaaccagcccatattgtattatagagcattaaattaaaaaggaaaacgtcacataataaataatttctttgaaacattttagtttttaaaccaaagtattattgacatacaaacaaataactacatttcataaatcatatatatatatatacctaatagagacaaatttatatattttaaacttatctctttaactcgccattagcattttagttctacattattagtacatattttaatccatatattataatatatcatattctcatatcatttacacatttttttaatttcagttcataaacaaaaacaaataaattagttcaatttaattatattacagtaaatatcacataatgtcagatcacaaaagaccattatcgttaaacggttttacagaaaatacattaccaaaatctaacgaaatgaatagcaacatgctaaataattcacaattgctcccaccggtatgtgaagattcagcagatgatgttaactatatcataaaaaatctaagttgtcctgcagataatgtaccaacttatgtttccaaacaatataataatgattctattgttggaaatgaaattcaagcatatgccaagattgcaggttgtaattggacttattatgttaaaagtttatcaattaccttaggtagaaatactgatgttcattcaagcaaaaatacagaaattatagatatagaccttggcccttcaaaagttatttcaagaaaacatgcatccattgagtatgatttgaatggaaggaaatggcaattatttatacgtggtagaaatggtttgaaagttaatggagttagattaaatttaccttcaacaactccctatgatttaacatctggtaatataattgatataggtggtacacaaatgatgttcattttacccgatgcaccaccagttattccaactcaattccgtcacttgttaaataataagagacaaaaattaaatgatgttgaaagtaatcaagtaagcggatacggaaattcaatggatctaaatgttaaatcagatattataaataatcaagttaaggcatttcaattacaagaaggcgtttcacaccctgatagtttatcatctgagcaagattattctaaggatgaagctaaagatttaaagccaccttattcatacgcaacaatgattacccaagccattttatcaaatcctcaaggtattttatccttatccgaaatttatgattggatttcaaatcattttgcatattatagacataccaaacaggggtggcaaaattcaattagacataatttatctttgaataaggcatttgaaaaagttccaagaaggccaaatgaaccaggtaagggtatgaaatggcaaattagtgaatcttatagaaaagaatttcttgaaaaatggaaagatggtagtttgaataaaattagaagaggtacaagtgtttccagacaacttcaattacatttgattaagaataatgttctgccaagtggaagggaaagacaactcccagtttacgcatcaaatggatcaggaattttactaaatgattcaaaccttatcaacttgtcaagctcaaatatgagtatgagtaatcacaataataatttgaatatgcatgttgatatgagtaacagcccaggaaaaactataaataatcatcaaggctcaaatttaacaggtttaacatcaccaactaaggtaaataatgctgcgaatgtaggtaatttaaatgttccacctacttcgagttacccacttccaaatctatctaataataaagttatgaataatgatatgaactttttaggagataattcaaattctaattcaaattctaattctaattccaatttaccatcacctgttaaaaactcaagtatcccagaaataacatatatgaatgctgatcaaaaatactcaactggtttggtcagcagcattaataataccaataattctgatcaattactaaataatgatacagttttgaaaaatatatctaatgaaaactcgaatgataaaattgtacctaagattgaaaataataacgataatgataatgaacacaaaaacaaactttcaacacaggaacataataatgatgacaataaaactgacaataaagaaataccagacaccaatagtaagtcagtctctgatgatttagtacgaaatactttaccaattccaaatcctaaaccacaattcctcaaccctcctgaaaataatctgccaatgttatcaccaaagaaatatttctctagattggaaatgatgacaccagaaagaaatattcaaaggcctgttttagaaccaaattctttacattccaatggatctgttaattcatcacctgcattatggaactatgttcaattttcaacaccattaggtccaaatactggaaacagtaatataccaactacaggtaatgatggcgataaacttccgaagatcgaattagaaagtccattgaaaaatagaaaaactttgggtaaagtttgcgactttaaagatatcgatttagtgaaaggttttaaacaataattatgatcttttataatgtaatttaacaaccattttatacactcgtacacatatctatatattatttataatataatctatagagttatgcattataatctttttatacaaacgctaactagtgtacttcatattactcattaattaattttagattctgtattaatgcatttttcatttttttgataatgaaaagatctaggcatcaaaattacattccgaaataaaaccgactaatttcgtctctcttcattaaagtagaatgataaatcgaccaaatttaacatcattatcagttccttgtaataccgtgttcataacatatatatcgttctaatcaataaattgacgaaattagaaagataagctatatcattattattattagttcatagacattactctacagctgatgaatagaccgcttaactaatatcctggtcacctttaattgtaccgtcaagttttttctcgtttagcatcataatttttattttgattgttaatagtattttttacaataattttgaatataagtaccacacggagattattttccaagactatattcaccacctgagcggaaaggagttcttaaaaattcgtatatgttaaaaatcgaatcaatacaccaacaatgatatcagttaactgcaacagaaataattggtttattctctgggagatttttaatagcgaacgttcaaccggatttaatatcatcaaatctatgtttatttcccgaatcttgcttatttcaatatatcggatgtaacattgatgacataaataaaaatatattactcgtattaaactatatttactccatactggatcaataaacaataacaaaaaaaaaaaaaaacacagccatcaggttttgatttcactagaagcgttggcaaaacaaaaagtttaacggtcaaaaatttcttgcaatttagatagtatattgtagagttgagttaccgttgtacttcctagacattatcctaaactatcgtaattgacttcttatcaattatagtttccattctgataataatgtatttttactagctcgatctagaagatgtatagtttccataaaatatattttcgtactcatgtattttgtgttctattcaacggtagtttacggtaatttcatgttaaacatttttgttaaaatttcagtaaacaatttctattaaatctttggcttgtaaatatagataatcaatccttttgactcactcaagaaacttaaaatctatttgagttttattaggtgataattcaataaattgggaacgttacactgataccagcgcccattaatattgatgcgaactttttgaaaatggctatatcaaatttttttatttattcttcaaatctttattctatgcatccaaattttttgaaattttgcacaatgcaactttgaccttcttgttataatattaccgttgcaataaactttttctatttggtattatttttatatttttattatctacatatcaccaaatgtaaaaatagcaatttgtcttgattcgtttaaaggactagtttagtatgtataggtttatcaaatcgcctttttaaacgcgtaatgctctacaattggaaaatatagagtttcttataagtactaagtagttcccactgctccaagtctacaaattaatttgaaaataatgaaagcccagatagttaatcaaaccatgctatacaactctttgaacaattcatcaattataaattcacaacaacccatgatgaataatgctcctgagaatctttctagtatacatccaagaaattatgctgactattactattatagtaccaatcctccgatttataatccttcagttatgtatcagccacatttttacgagttaaacaattgtccacatataccaatcccatcctacatttccagtgactcttgctatattagttcttcagatataaaacctatcagaaagaaagcatttagtagaagaagtaaaacaggttgtttaacttgcaggtcaagaagaatcaagtgtgatgaactgaaacctatatgtactcattgcaagaaatcaaataaagagtgtgtttacgcagcatctaccactactagcactaataaaaccaaaaggctatctaaatcaacaagaaaactaccaaagaaagcatcagttactgtaaatcatcccataagtcctttattaccagcggctagtaattcacctacaatttcaaataagtctattgatttttttagcagggatgaaaacagttcaacaccagctagtacagtttctagatccgaacaatcaaatcaagaagttttgaaaataaacaacacacttttgccccagcaaaaagatattcttcatgcttccaagtgcttgaatataattactccgcctcttcaataccaacaaattgaaaaagaagctcctcttcaattcaatccacattactacactcagatatacgatcagcaaccaaaaagctttagaaataatcattcttttaattatacagcaacaaaatacacacctaatagccaacaatttggctctttaaacagaaactgttttcccatgtatccaaacacagcaacccatttcaatactatgggaaaacatttcgcagaatggttaccagctatgacttttcatactccacaatattatccgaattgcaatactaaggaaggtattttttgtactgatgaagtgttaccttccaatatgtctttctttgatgaaaattcagaattaaattcacatagtcataaatctccacatcatggaagagcacaaatgtaagatatgaggagccaaatattatttacagtcaaaacatgctataagtttatatcatcatttttttatatatgagaactccttttagcctaaaattttagttatctagtttttatacaataatcgtttgtttaaaatacttttcttttgctttggttatttttaggcttgctaatgggcaaagcaagcatataaagatatatgtaaaaattaaatagcaagccttttagatgacttattaaactaagtttttttactaaaaaatttgaaaaaggtggtatttttgaaaaatttcactaatagtaactaaacctttttcgtttataccacattaatagagaacttgtttatagttccattacatgagaatgctcagatgtgatgaaagtttaaattttttttcgcttcttggaataaccgtgctatgccgatgataagtttatatagtgtcctaaaagcattttagccacagtttggtaaagttgtatatatatgtagagaaggttatacaatataatttaacgttactgagcaaatactaacccggatttggaaactttactgtactccgtgttaaaaaaacgttagatcttaggcaatagattcctcctcatcagtaagatcttttggtatacaataaaggaagtatttgaattatacattggaggtgtttacagtattatacttacagtgaattacttaaaactaatgtgaagacacattagttaaccatttatgcctgatattgtataatagtttcaaatttaatctaaagtgaggatttgagaatcgggtttttaacataatttagatgtaaatccgctgattatttaacatacgtcacccacgacgaaaccagagaaaaatttgaagaagcttccaagactatattattctttgcagaaacaagaagaagaaaacttttactctttatagacatcattgaggtcgaagttgtctaatttattttgtaaataaatataattcgggagtaatatgggtgataacattttagtcaaactttgtgttatcagtgccttaatttttgctctttctcgatttatataattgtaactttaataaagactcacaataatattatttaaaggctaaataatagaagttacttaattttagagattgagttagtttgtcgggttatttgatataatgctgaagtatatcatatcactcgtttaggttttacaagtttgctttaaggaacattttgaacgccttaagaaatacttcaaaaactttatatatagcaatatttcttttattgtagattgtctggatatagcatactcacttctcctagatattcatacttagtttttgtgtttcatttataaattttcttttgatttaactgtatttaacatccaattaataactagagaatctcaaaagaatttgtagaaatttttccctcaaaatttaccaatgaataataatttaagatttacagactcatttcaaacacataatgattatattaattattactatgatgataacagttttcattcatttcaaccaatattttatccacaaccacatgaacatcttaattatctctataagaatgattatgtaccaatccaaccttatccgcaacctcaaattcaaatcccaagtttcaattctcattgctatctaacaagcacaaattcaaaaccaattcgaagaaaggcgttcagcaaaagaagtaaattaggctgcctgacatgcagatctaggagaattaagtgcgatgaactaaaacccatatgcacgcattgtaaaaagtctaaaagagagtgtatatacccagaccctgctaccattaaaagatccaaaacagctacagttactaagaattcaaaaaaatcaccagtggcttcatctaaagctaaaatttttaatcatttagttaaagtagagaatgaggtctaaaaaacttacactcaatgtttaaccaataagagccggtccaatgaagaggcaaaagaagacatttatattagagaaatctcatcagttttgtatgaaagaaaatcccccatcaatatagcaagacaatcaattccaaacacaggtctgataacaaaagatcaatataaagcacaatttaaagaacaacctttagtgcaaccttcagcacaaaaaatacatcaaaaagtggaaagtgaacccattctagggtgtaaccagcattgttgctcacaaaatcagccagtatcgtattttgaacctgtttatgaaaggtgttacagtaatactaatagaataggaaatagccaggtttacaataggatggacggaaacaatcacatatattcaaccacgccaataaattactacactaatcaatatttacttgataataacaacatagcacaaaaaaacttttccacaaatggttatggtgattcagattacagaatgggaccgcatagccaagctgaaaactcacgatcacatgtttggataaacaagaatgtttcacttaattctttactggaccaaaaagctcattacaaaagtttcaatagcatatccttagctgataatccaattgattataatgatgatgtttccggtgacccccataacaacccaagaatttttcattcatactcacatccttgacaaacaaaaaaattacctacgttcttcatatagcaagttagaatcttttcgtttatattacaaatttatataatattgattaaacaaatttaacatcgtataattacgcttcaattacttcactcgaagtattggtttgcaaaaacttcagtgtattttgaattacctttacatcatcaccggttttttcttctaaatttttttgaactacactaatcgaatccttaatatctttcaaaatggattcaatcttttcaaaatcattgaaattaacagtttcagcaaatttaataaaaccaactaattttttgactttttcggaattgattccatgcgcagaagatttatcaaatacatcatcatagcattttctaaatacagaaataaaagtttcttgtctctcaggactaaatgagatgaatgaatttttttgattactggatcttgaaggtaaaggtattgcaggttttttatcagtatttgtttcacccttatttaaacttagcttactaaaatctttgaccaatgactcgttatcaaatttcgctgtactgatcaacttcttgaaaactttcaacatacataatgtgttatcatcaaatggacaattatctatactatctatcatatattcatatgcaaaatcttctggcagatgttgaagaaattttaagataaaactggagtataatttagtaaacatttctgtagcagtatctgtgaaaacacttggaatatttgatataatggatgctatgttttgcaagtatgtaataattagaagtttggagctttcttcatttaattcttcactagttaaaactattttttctttttcaattttcatgattgttatggtcataaaataaataactgatgttagattggttaacttgtaatcaaccaaatatggaatgaaaacagttaattgcaattttatcaaagataaagtagaaatagaatcaggtaactccatggtccaattctcagaatatttagcgtatgcaaataaaatgataagtgaggaaggagacggtgatagtagttctgtagaagatttgttcctgaaagaagagttgttgtacgaagagatcaccaatttaatgatgtcttcactggaattcacggtttttagagattttgcaaaaagatcatctgctttttcaacctcatgaaccaaactatcaggaattttaatatctaaagataaagacaaagtcaatagtctgtccattaactcataatatggttgtccaagaacctcgtaattttgactaacagtagatggcaatatctttgcaactaaaacacggaaatgaccttgaccaaacttatcaatgattgaatcggctagtaaaacaatcaattttctttgtaaataagattcatcagcaaatattttctcaatgacttcttcactttctgttttgaatatatcatctggcgcatctggtggaacataatctctaataaagagatataatattcttagaatggaaagttgataagatgtttcatagcagtttgtcatatagttcaatattgttgaaacaattaaactaagaaatttagatggatatatagttttaatccttaaaaatgaaaacttcatacattcaaacaatgcacggaatttcaagaccgcctttcttgaattgaaagaaacaaataacctaaaaatataagcatctaaatcaacaacattctccttgtcttcatcactaagtgaacgagttaaaatattaatttgttcttgtgtcatctctaagttgtctgatttaggatcagatagttttttgatttcttcaacacatgttaaaaataattcttttggattaccaaattctgaaaccaaattgaatactttaaaagctaatgtaatttgaatattatcacgcaatgctggcatcattggccaatcgccatccatgaaatttaataaaagaggtggtatatcccatgcaatttctgcaagtagttccttattttcagatatgattgtataaaagagttccatgagttcaacacgttcttcaatactgtaggcattccagtcctcaaaatagatatctacaactgttaggaaactgatattgtcatgactggctgaacaatctttggcagcttccttgataatgtcaacaatttcagggaaagttagaggtgacatagtattgagagactctacttcagtatcagacattgtttcctatagctataatattcaatgatgctacaaaatcatacaccaatatacaaaattacaattaagtaattaattaaaatatcaaaatcgattactgagaggtaccacaaaaaatttgtcacgaaaatcaaaatctgttcatctcaatgtacgacggaaattttgtactaccattcgtctcatctacaccctcccattgacggataagttcccaagcttgcagttcaccttcatcatcacaatttctatgttcttcctcaattttgaacttatagacgctttcttgaatttttgtctcttctaacaaccattctgtttcatttatcttattctgtcttcttttattatcggagaaaactcgtttctgtcgatgaaataaccaagttttctgtatcgatgaagtttttaaacttccaacaatcatctgtttcactaaaggcatactttatgtattcttggactgactcagactttaaaatgtcattacctaatggaggattggtgtttcctaaaatactctttgttatattcaaactcttttcaaatttcttagctatcgcatcttttgatggaactaaaatgcctttgagtgtggacatttgatgaccttctaaattgtttaccgaatcaaaagactcaaaatctctactcaattcaactgttgtgttattggtttctatgttatttgcacagaattcaggcaataatccgaacttctttatcatttttgatataaactggaggtagaaataatttatctccgactctattcactaaatctaatccaaagctggattcgtcagagcttttcagactatatatgcttttttctgccttggaaattcttttaattatcaactctaattcttttttaaagtttgaaaaaacattgcctaacataaacgatattattgcatcggttccatcttctctactgatcaatgatatcccatctttcaaaatcaacatgtctcttagtctaattaaaaaccatattaatgaaatatgatgcccaccagcaaacaatgcacaataaagaatagtctcgataattttgacattcccgacatcatctgcatagttactgtttaataaagaaacacacaacttccatcaacatatacaattgttcttcatttagcaattttatttctgaacttcttctactattgatttttggaatggtatgatttgatgcataaataaatgacaatctttctaatcccaaaactgtatgcacaaagggtaaggtttgagtttattataatcttttactttaagatttccttgaatataaaaaaatttgagctcaaaaatatcttttttgaacgtcatgttgatatcactatatttgctgctaacaagcgatttgcttgttaaattttcaaaatgttttctataggccagcataataaagattgatgctaaacaacctagatcagtaatatcacccataaaatgttctgcatgttcttttaaagaacttaatgcttttttctttttatcaactaactcttttgacaacccactctttttttccgttgtgaagaattgatacagaagtttacaataaaacacatgtcttctaaactcaatgatcagtaaaaactttctttcgattgactctttattgatctcctttattaaaataaactctttaatcaaattgactagctgacatttcaaaaagttacatatacctgatacaatgtttttcttttttaaattttcataggcatattcaatcacatttttgacactaaaacattgtcccattattggatccggatatttctttatcatactttcaattatactggttactgaatttgatgacaaagctttttctaaaagaatattcggtggaaatgtccaaataaattggtatattttttcaaaagatacctctatgtcttcggagtttctattaacaatagtggacaaaatttctgaactcatttttttatagttttcaagatgcttaatcagagcacgagcaaagcggtgatctttttctttgatttgtgttggagcagattgtaaagcaaattttattatagacaatttagattcaaggacggtgtaattagaaaacatactcatgttgaggttttgatcaagtgcagattcattggattctatcggaggaagttttaacatcttgatatcgaatatcaagtcttgtaacataagttccttatccgttgattttggactctgtctgacaacttctaaacctgtacgaagtaaaacattagccataattgtttgtccagactctgctagagctttgctaacaaagtaaagtgtgtcagtttcttccttaccttcttttgatctgattgaaatgaaaaactgtcgtaaagcaaatgtgtttcttttaagattatgtgcagctacaccaagctctaaagcccgatcatccgttatagatccatcaaacaatatttcctgtgttaaatttaagaagacggagaatattagttaagtaaactattttccattcttggaacgatgtgatatgaccgattgttccttttaccgtgattataaattcatccttactattttctatctcattcatattacagtactctgctgccatcggtggacctcttatccaaaagataaaatatggtaaagctaataataaacatcgatttgctcccctttttgatatccttcccaaataggcagttaaaagtatcccaacatggaataatggattcgcgcaaaaccccaatgtttgcaaattgcaaattgaaactgaatattaacatcatagactccgtaacttttattgaagcaaaaaacaatcgagaatcataccatccttgatacatatgagtaaggatgactcttcaggatctagctccaatgtgggaaagtttgatagtggaattcatctgagagatgatacgctaactagaaaaatgccttctttcacatttgaaaaatatgttactcatacctctggcctgaatatagaagaagaagaaaagggtgatcacagtaaaaaggcttctgaagaaaataaagcatttgctcacaatcataatgatacgaatcaagatgatacaaaagaagaagaagattttgaattaaatttaaagggtggatcaccaatgttaaatgactttcaaaatccatttgacgaaactccaaaagtagttaaaacgaaagcaatactagaaaatgaggatactccaatatttagtgattctgaaaaatttccaattgctgatattgaaggtagaatattatcaaatttttcattgtctccatcccttatcacagacgcagataaatttcgtaggctgaaagaaaaacatttagatgcaaaaacgtacccaaatcttgatttttctaatgtaggcttgataatagatactaggaaaagtgatgaacatgatgaaaatgaggaaaacaccaatgatgattcaagtataaaattgaatttaatacctaataattcaagaagtcgaaattccatcgatactccaataataaacaccaaaaaattaggaacacgaattgaaacacaaattgaaaatggtggagcaacgcaagcagatggtaatgttcatgaatttgccaatcaaatatcaaagaatttacgaaacagtgctatagacgatgatgaaaatgacgttgatgatgggtattttttaattggggatccagatgctggtaattttcagtactcatcaaatgattcagaaaaaaaagctcttacacaatcacctgtactgtatgcgacacaaaatattgatgaagacgaagacatagatgaggtcgatactctgagaagacctttgaatgttccagcgagtttgaggaggtctaataaaatgattcaccctagtccaagggaaaatctgaatgcagagttatttacgacttccacacaagagatctccacttcaagtcagaaacatataaaattgacagacgaatcaaagaaagatttaatcccaagtgacaattcagatactaagctgcgaatgattttgaaagaaacccaaataattggaaacatttcacaatcttttgtcttagatgaagatataattggagaggaaagtgatagagaaggtacaaatattgatctgctagaaagtggaaggggtagagatgaagattatgaagatgatgaagatgaaataataaaaaataaaaacactataaaaacctttaaagttaatgatacccaaaacaataatacacaaaataatgataaaactgaatcatctgaattaaagatgactcaaagaattgatccaaacaaagaaatggaagataacaattattatggattacccgaaacccagaagatcaaagatcagcaggatattgatatgatggataatatatcatcaccaattatatcaatacttgaaaacgatggaaattcagatagtaaaattgatggatatactggagaagttcctaatacaagtgcactttctattagtaaaattgacattcaagttgaagacacaaataaaattgacaccgaagtttcagaaaatgaattaaaacctgatacattgcctaagttgaaaagtcatacgtcaagtccaagcttgttgagaatttctgatttgcagatgaacgatgaaaatgaagaacaaagagatatcacaacttccgcaaaagttttagaaaggttgaacagtgctttcaaagatgatgataatatacctaaaacaccgagagatagaatagttaggaatttgaaaaaaagggattatactattacagatgttcttgattgtaatgacgtattttttatgaatttaacgaaacgtataccaggttcaattgtcagtattcttgaaaagggtgaccatagatatgttacaataaaaaccaaaaataatgaagaggtggttgtggaacactctaagttatatgcaccgatttgttttgacattggtgatgcaatcaaatatgttaatgataaaaggacaaattttattattactggattatcaatagaagtttataataaagatgaaatttgtgatataagaacagttgatggattcaacaccattcatatgaagtcaacaaataaaagtaatgatgaagaaattgctgtacctatagaggatatttatttaactggagcaatttctagaagctataaatataaattatttaataatgaagacgatttcaaggaatatgttgattatcaaatcaataaattcaaattgaacggaagcgaagctgattctagctcgttaaatcctaatgatacattaatacaattattgaaaaatgatgaagtggagccatataaaccaaggaatataaatgatgggaatgaaataagggcatcaagtttcttaaacactaacaagaaaggtccattttataaatgcctatttgttatcactgggttaaacaattcccccatgagttcaggatcagtttatggaatgaagatcggcaattctagacaatcatcaccaagaaaacaaaaagatcaatttgaattaaatgccttaattgaattcatcaaattgcagggaggcagtataatacaagagacgggatttgaggaaatcattcgttttaagaaaataccaagtaagaccaaacaaacccccaatgttactatatcaccaagaaagaagaaactgttagaaatgctaggtaaagcgaatgatacaaaggaattgaaacttagtaaaattgaaaataatttcaaatattacgaatgtgtgaaggagaagaaagacttttatgaatgtttcattcaaggtgaagatacaattgaaattgaagaacatattaaagattttgaatttgcatgtgtattatcaagcagacatgtgagaacattaaaatatttagaatgtttaagtttaaaatggccaattttaaatattgaatttattaaacgatgtatggaagataaagaattgttaattaaatggaggaagaaatggatgaaatatttattaatttctggagaaagtacattattaaactgttctattggattggatatttttaaatattacgataattggaaagaaggtataacacttaaagatcagttgttgaataatgatattttcaaaaagaaatcaacaatgattattacagatgaagaagcaactaaattctttgaattgtatgaaaatggaaagaatttaaagagtggagataaacgtaaaactgcaatttctagtagagagattcaaagaaagaggaaaagaacatttagttataatgaggataccgatagtgaaattgatgaaaccaatgaagaagaggaagatggtgataatactagggaacaatacgcaagagagagtttacataatactattgaaggaccaacatctaatgagacattgttatggatatttcaaaaaatgggtgttgaaaaatgttatattttaaaatatgatagtgttccctataatgttattggaaggattactgaaaatgaaaagggtacattatttctttattgtaaaggtggatgtaaagacttaagtggtagtgtacatgaagatagtaatatctgtgtaattgattgggaatggattgttcaacgtcttatctctggtgtatagtgaagatcatcaaccgtttttttttagcaggaaataatctggatttgatttgattccgaaaatggacacttttttagaaaatgaggaaagagaagcgagcaatgattatagtctattaaatgtaaaaaaacgtgacgtaaatggataaaagtagcgagaggaagggagaaaatgggagaaattggaaaataattttttttgttgaatttcgggaattaattgccactgctctgtggttccacaagttgtattgtattttttaattaaaactacatcttcttttctttcattgatgttccttttattttagattgctctgctttcaagtatagtataataacgtatatatctaatataatataaccttatatacatcaactagaatcattatcatatagatacaagtatatcaagaaagttaagaatatttcaataattaataattatttctcatcatgtcggtcactggaactgtggctacattcttaagtacattcattttgtacacatcaaatattatcacataccctttcataaatattttatcaacattatattcctcaatagtatttcttgttacaggtgcattaccatataagaataataacaacatcaatagtaaagaatctaataataatgaaaagattaattcaagtttattatttacagatgaagatgatgacatcaatgataatttattcccaacaattgttaacattgataaattaattcctatgaacacatcaagtgttaaacaatgtagtacaactcatgcagatttatcatttgtaccagaaactaacaatcaaggtgaattagaatttaaattaagaagtttagaaaatgaagaacatatgattccatatcatcaacatcaacaattaaccccagatttagattctcctaataactcatcaataaataataaatcattagcaatgacatcgactgaaaaaattgttaatgaattatctaccttcagtaatgggtttatttcattatcaccagtttcatcaattaaatctaatagctactggtgaatacatcagaaaataataccaatacaagtagtgttaataatgatattgatattaaaatgaatggaattaactaatgatgattgtgatagtttagagggagatatttcagattctgagaagaaatatcaatgtccacattgtgattcaaaatttaaaattcgtggatatttaacacgtcatattaagaaacatttatccgaaaaggcatatcattgtccattttataataatgaatcacatgatagtagatgtcatcaaactggaggattttcacgtcgtgatacatttaaaactcatttaaaggcaagacattttaaatatccaccaggtacaaaatctactaaaagaattggtatgatgggttggtgtggaatttgtggtgaaaaatttttaaataatgaaatttgggttgaaagacatattgaaatgggattatgtcctggattacctgatgattatcttaaaactttaaaaattggtaaaaagaaaacaggtaaacattctaaatttcttgatgttagtaatataaatgagagtttacaattagttaatcaaaagaaattattgaataataataataagcaaaagaatgataagattaataaaaatattaaggaaggagaactttatttacaaagtccaccaagtattaattcatcaccattacctgcaatgaataatactgatagtttcaataattcaacacaaataaataaagtaatattaacgacaccacaatccgttagtccaaataacggacagccatttgaagtttcagcaatgtcaaatacagaatatatgggtataaatgatatgaatgtgaatcataataaaagtgatagtaataataacaaccagttagatactgagacaatacaattattacaaaaacaacaagaattaactcaaataattagtatacttcaacaaaaacgtaaagaagaggaagaagaagaaaagagaagagctataattcatcatatgcaacaagcacaacgtacacaacaaataatgcaattaaagaagatgcaacaatttcaacaaatgcaacaattacaacagttacaaaagatttattcacaaaccaatgatactattaataataataataataataacaataataataataataataataataataataataataatagtaattcaaatcttaatacggaaagttcaataaatacattgaatggtgataataagttcaatggtatcaataataatggtagtaataataatggaaattacaatattagaccgatacttccattatcacgaagtgaagaaattgttaatagtaatgaaaacgaagaagatttcccatcattagatggagaatttgttggagttgcaacagtttaaagttgtagaataattttttgtgtataatttaagttaaatcaaatgtgtaatgtataatgtatagtatgataatatcaggtaaaacggagatatatatatatacagtctttttaaacaaataagactaactagttatagttatataacgccagcaatatgtaataaccgaacctatattgattcagtgtgcagtaaaatttcagggttcccagtacttcatgggcagtccgcagtagctttattttcaaccaccggtgataattttcagttcctggtattttcatgttgcccactagttatgacactccactgggagtaggtcaaagtcacccagtagtttgagatttcggccccatgtatctaaatcgtcagctgccagtttgattttccaactgtacgcgaattggtggggctagcagttgatgggcatcagccacaagaatgatatctcgcccagtagttgatgggcaccagccgtaatattgttacccacgccgccagtcgcgacgctaccgccgcaagattgttgcgtcgaccgacggtatcctcttgtcaggctgaaatcagactctaatcaggccctaataagggtgaagtcagactctaatccggttgaagtcagactgaagtcaggttcttatcagactcttgtcaggctcttgtcaggctctactcacgccctactcacccgctaatctgcccagtgtcagactttgatcaggcgggagtcatgctggagtcaggctcaaatcagaccctaatcaggctctactcaagtcctagtcaagtcgtattcaggccttaatcaggccttagtcaggccctagtcaggccctaatcaagccctagtcaagccctagtcaaatggtagtcaagtcgtagtcatgtatataaattattttaattactgtgatgtgtgattgtaatattcacagtaaataatgggtgtgattgtaatattcacagttgtgattgtaatattcatggttgtgattacgatattcacggtgaatagtgattgtgattacgatattcacggttgtgattataatattcacggttgtgattacgatattcacagtgaatagtgattgtgattacgatattcacggttgtgattataatattcacggttgtgattacgatattcacagtgaatagtgattgtgattacgatattcacggttgtgattataatattcaccaaaatactttttacctttcaattacaatttgattactggaaatgttaaaattaagcagaatttatgttattatgaatcaaaaattaaaatccataaagctgaagcataactttttcaaaattttatatgggttatttgaaaacatcaatatagaaaaagttgcatactcttgctacgacaaaaaacttcttgaatattacagagatatataactaattttttagaatatagacaaaatattcaaacaaattgctttgcaatggtggttttggactttcacctttgcattatctatcaatgactgaagatgttgaagaaatatatggttataccaaggatcattatttagacattgatcaaattctagatactttggctccattataaatttcagattctacactcttaatgtatttctcaacaagatatgtccacaaattttataacatcaaatactataatcacaatccttaattcaactactttatgtaatcatactaccatttaaacgtaaaagtcatagccaccactataattcatttgtaattatcatagtgacaccgcaacagttcacgtgtaattattataatcaccgcatcaacttactatgattgatacaaatacaagcggaagcaccaattactactaaaactcaacgggattatattaatcacgatgaaagttttacgtgattaatccaatcacgaccatacaatactgtgattattataatcacactcatatctagagcaaattgatgtaatcaccatattaataatgtgggattggtataatcaccagcttcatttaccgtataaattttaatcaccagtcagaattacttttgttctagcattgcatctgactgtgatcactgtaattaagccaaatcccctttaacttaataatcactatattaactggttgtgattaatataattgttgtattagctcagctcgatctttaaagttacaatcataattcacagttagtagtctattcccattctcaggttgttgtaattattataatcacaacaatcactcacagtgaatatgataattacccactttacttgaggaggtagttagaatttgagtcaaggtactgtgtgattattacaattacaatgtgtaatatggattcctgactaataatgattacaagtaaaatattttgtatcatgtttgatacagcaaccagcataactgaatgtgaatatcataattacaaatgtgaataacacaatcacaatcgtgaataacacaatcacaatcgtgaataacacaatcacaatcgtgaatatcgtaatcacaactgtgaatatcgtaatcacaaccaccattcactgtgaatatcgtaatcacaactgtgaatatcgtaatcacaaccaccattcactgtgaatatcgtaatcacaaccgtgaatattataatcacaaccgtgaatatcgtaatcacaatcactattcaccgtgaatatcgtaatcacaaccatgaatattacaatcacaactgtgaatattacaatcacacccattatttactgtgaatattacaatcacacatcacagtaattaaaataatttatatacatgactacgacttgactaccatttgactagggcttgactagggcttgattagggcctgactagggcctgactaaggcctgattaaggcctgaatacgacttgactaggacttgagtagagcctgattagggtctgatttgagcctgactccagcatgactcccgcctgatcaaagtctgacactgggcagattagcgggtgagtagggcgtgagtagagcctgacaagagcctgacaagagtctgataagaacctgacttcagtctgacttcaaccggattagagtctgacttcacccttattagggcctgattagagtctgatttcagcctgacaagaggataccgtcggtcgacgcaacaatcttgcggcggtagcgtcgcgactggcggcgtgggtaacaatattacggctggtgcccatcaactactgggcgagatatcattcttgtggctgatgcccatcaactgctagccccaccaattcgcgtacagttggaaaatcaaactggcagctgacgatttagatacatggggccgaaatctcaaactactgggtgactttgacctactcccagtggagtgtcataactagtgggcaacatgaaaataccaggaactgaaaattatcaccggtggttgaaaataaagctactgcggactgcccatgaagtactgggaaccctgaaattttactgcacactgaatcaatataggttcggttattacatattgctggcgttatataactagtaatatgtaaaaatcgaatgtatcttagttaagtccgttgtaacttcattttcaactacccgtaaaaattttgaatccccagtatttttattaagcgcgggggaagtttactgggagctaaagaatcatcgccggtggctataaataaagttacagcggactaaaccaacatacatttggttactgaatattactagttagtctcattcatctaaagagactgtatatataataacagtcaataataattcgtatacgtcgataatagaggacaatacaaatttttttaaaattttcttattaaatttaattaatgagcgcgttttattattaatagttaaatttagaaatttagaaattttgaaattgaaaagcactatgtcataggtattggattggtattggcgagagattctatttatttccttttttttttctttttttttaaatttcttttcttttgacgtgttgttgttgttgcttcttctttatcacctttatattccacatcttcacatctcactcaatctcctcaattatatttaatcccggcttagagtaagtaacaattattcaaatacaattgaatataagtaccaataataacataataataataatatcaataaagataaaaataacttactcactaattacataataataactccttttacagattgttattttccgcattttttacttaaaataaatttcacatttcaatttttctaattttatacacaggttaaatctcaactaaaggtacatgttctcatcattataagcatattaataataaatttaaccacttaaaataataatatataaaccaattttgaagatattatacaaaaaatctcaaacttatccatattaataataatattataaaaaaaatactagacgaacataacggaattaataattcttataaccataatcatagaaaaaataaaacatatcttcttaatcaattaaatgcaaaacattattatacaatatataacaatattactactgtttatacagtcaacgatatcaacgtcaacttcccccttaccaactcaaatatcaacaactataacatcaacaaatgcttcaagtcgacatacgaattctgcttccactacttcttattcaaataattctgatgaattttcagatcgtgcaacttctgcattaccaatcttaaaattttttcaaggaaataattatttctttgattatataattgaagttggtgaacctcaagaacaaatggctttaagacttgatttattacaaggtgatgtttggttacctgcaactaatgaatttgttgaatgttcatctgctagatcaagttctttaactacaactatacctgttgatactaatcttattccaactataacaagttctgaaactacaagttcaaatgtaacgtatctttatattagtttatcaacatcctctgattattcaactgttactgtcgatatggttgatacagtttacgttcaagcatgtgcaagttcaggggtttataatttattaaattcattaactggtagtttcattgatattacaactaatttattaacagatttggcaaatgcaacttattattcatttgtttctatttcaggaattttcctctcaggtaattgggcaactgataattttattttatcttatttatttgataatcaagcagttgcaattgaaatgtttgatgttccattcgtttatgcaaatttctcaaatgttggtgttggttcattagctttaggttcaactccagataaccatgttttcaattataattttatctcaaattttgttttaaataacttaattaaaacaaattcttattctttagctttagatgctaaaaatagttctgctcctcaattaatcttaggtggtattaataaagattttgttcaagataatttaagttcaaatgaaaataatcaatcaatggcattatttgattttgttccagttttcgatgaaactggtacaattattaaatcaaataatggtatatcaaattcaatgcctgtaataccaatttttggttggggtgttacatcaacaacaaatggtgattctttaatattttcttcaagctataatgatagatatgaagtttcacaatatccaaaaccagcagttttagattcaagacattcttataattatattccttattcaacattaattgaaatggcaattgaattaaatgcagtttattcatctgatttagatagatggattgttgattgttcagttgatagaagtggtacaatggatttacatttaggtaattatacaattcatatgccaattttaaatttcctttatcctgcaacttcaaatcaaacaaatttagttttcaataatggtaatcctgcttgctttttagctttcttaccagattatagaattggttattcacttatgggtgtaccatttttgaaaaatatttatttagctgttgataatgaaaatcaacaaattgcagtttctcaattgaaaaatcaattaagtgatttaaatcttgatatttcatcacgtcctttttcaatggaagttgatattgaaaattttgagaaagaaaataatgaaattgaggttaaaaatgttaatgagactaaagttgaaccaaagattaaaaagagagaaactactcaagaatcagatcataaaactcaagttattggaatgacaacattatcagcatatgagaatacagtttcattagaaagagttgaaacaattacaagttcaaatactatttatgaaacaactgttacaatttcagatgatccattctttacaaaaggttttacaggtcaatcattttatgcaattgaatcaggtacaattccatatgcaaaaagatttgttaatataactgatttaacattaacaattccaagatcaatcgaattaattgattattatagtcgtgggactgaaatttatatctctgatgatgaagtttacttacaaactgattatcaaactggaactgatggtgatgcaacaacaatggttcaaagaacaactgattcatcaactcaaatttatggtttctcatcatatgtttcatcaattagttcaaggagaatgtcaggtgctggttctcatgttgaatttccaattaaattttactcttttactaaaagctattcattatcattattttgttttcttgcattctttacattattcacaattgtgttgatgtaataataaaaataataatctcattatcataaaaattgtacttttttcccatatttttttttcttcttcttcttcttcttcttcttcttcttcttcttcttctactacttttaattcttccccagtctactagttttattacattttttcttcttcctgtgtttgtttatatttttatcatttattatgtataatctatatgtgtcaatactactactattataatcaaacttcatgtatcgcttcagtcgcgtctgtggggtgaaagattttcaaaaatttcactctcactgtaaaactgaaattttaacattgctgaccaaacaaaaatattgagtttctcattggggatgaaaaaatgggaaaaaacatgaattttttgtgaatttttcagcttcatagaaatttttttctgaaaaaaaacttaaattgttaaataatcaataattaaaaccccgtttccacagagctaataaacaaactatacataatgagtgacaagaacttacgtattgctattgtttcagatgataaatgtaaaccaaagaaatgtcgtcaagaatgtcgtaaggcatgtccagttgttaaaactggtaaattatgtatagaagttttaccaaatagtaaaattgcattcatttcagaaaatttatgtattggttgtggtatttgtacaaagaaatgtccatttggtgcaattcaaattattaatttaccaactaatttagaaagtgaagttactcatagatattctgcaaattcatttaaattacatagattaccaatgcctagaccaggtcaagttttaggtttagttggtactaatggtattggtaaatcaactgctttaaagattttatcaggtaaattaaaaccaaatttaggtagatatgatgatccacctgattgggaagacattattaaacattttagaggttctgaattacaaagttattttacaaaagttttagaagatagtattaaaacaattattaaacctcaatatgttgataatattccaagagctattaaaggtccattaactcaagtaggagaattattaaaggcaagagctgatggtaatactaatgttaattcaattaaagatattattagaatgactgatttaaaaaatttattaaagagagatgtttcaaaattatctggtggtgaattacaaagatttgcaattgcaatgacatgtgttcaaaaggcaaatgtttatatgtttgatgaaccttcatcatatttagatgttaaacaaagattaaatgctgcattaattattagatcattatctgatactgatgtttatacaattgttgttgaacatgatttatctgttttagattatttatcagattatgtttgtattctttatggtgttccatctgtttatggtgttgtttcattccctgcatcagttagagaaggtattaatattttcttagatggtcatattccatcagaaaatttaagatttagaaatgaatcattacaatttagattagctgatgcttcagattatatgatggttgaacaatcaaatagttttacatatcctgacatggttaaaactcaaggtgatttcaaattaactgttgaagcaggttcatttaatgattcggaaattattgttatgatgggtgaaaatggtacaggtaaaactactttatgtaaattattagcaggtgcaattgcacctgatgatggttcaaaggcaccagaattaaatgtttcaatgaaaccacaaaaaattgcaccgaaatttactggtactgttagacaattatttttgaagaaaattagatcatcatttttacatccacaatttaatactgatgttataaaaccattaaaaattgaagatattattgatcaagaagttcaacatttatctggtggtgaattacaaagagttgcaattgttttagcattaggtaaaccagctgatatttatttaattgatgaaccatctgcatatttagattctgaacaacgtattatttgttctaaagttattagaagatttattattcattctaagaaaactgcatttattgttgaacacgatttcattatggcaacttatatggcagataaagttatggttttcgaaggtaaaccatcagttgatgcaattgcaaagaaggcagaatctttattaactggttgtaatagattcctaaagaacttaaatgttacattcagaagagatccaaattctttcagaccaagaattaataaattagattcccaaatggataaagaacaaaaatcaagtggtgattatttcttctttgaaaataacaaattataatagtaatgatataatatgaaataaaatacattatacattattatcaattaatcgtttcccattctattcattaatcattcattagtataatataatatagtatagtatataactgtagtttaatcctttaaataaaagtcaaaaaaaaaatttaatatatgcaaaatacaagttcagaagatacaacctacaactatcttcatatccaaatgcataagcaaactgtgaacacgttgatggatagcaagtgattcatcctgtgtgaaaaaagacccaaatttaacgttttttccgttttcttaattttttcactctcactgcttcgcccattttgaaattatttttggtctggcgattttatgttttacaatttgttataatgactcagtatattgatcttttaatttaatttgaagagtcaaactcatcttttattcacaatgactgaagaagttacaaagaaaatagaagaagtctccttaaattctgcaccagtatctgaagaagcaccaattttaggtccagatggtcaaccattatctaagaaagcattaaagaaattagaaaaggaaagagagaaggaaaagaagaaggcagaaaaagcagcccaacttgctcaagaacaagctgcaagagaagctgcagctgctgcaaatgatactgcaaaggataattatggtaaagcaaccattaatgcaatcaaagaaggaagatattactggtattaaaagaagtaaaatttcatcattatctgctgcaaatgatggtgaagaagttgttttcagagcaagaattcatactgcaagacaacaatctgctaatatgtgtttctttgcttttagacaacaagatgaaattgttcaaggtttacttaaaatcaaatggtgaatcaatttcaaagcaaatggtcaaatgggctgcaagtttaagtttagaatcaattgttttagttcatggtattgttaaaaaagttgatgatttagttaagagtgcaactgttcaagatgttgaaattcatattactaaagtttatttaatttcatctgctccagctcaattacctcttttaattgaagatgcatcaagatcagatgcagaagctgaagcttcaggtttaccaattgttaacttagatactagattagatgccagagttattgatttaagaactatgactaaccattgtatctttgaattacaaagtggtatttgttcacttttcagagaatatttatcaaaattaaatttcagagaagttcactctccaaaattaattggttccccatctgaaggtggtgctaatgtttttgaagttacttatttcaaaactaaggcttatttagcacaatctccacaattatataaacaacaattaattgcagccgattttgaaagagttttcgaaattgcacctgttttcagagctgaaaattcaaatactcatcgtcatatgactgaattcgttggtttagatatggaaatgacaattgaagaacattatcatgaagctgttgatactttggctgatatgtttattttcatctttactcaattaaaggaaagatatgctaaagaaattgcaactattagaaaacaattccctgttgaagaatttaagattccagaaaaaatggttaaaattcattataaggaagctgttaaaatgttaaatgataatggtaaagttcaaggtgattatgaagatttatcaaccgaaaatgaaaaattccttggtaaattaatcagagataaatatgataccgatttctttatcttagataaattcccattagctgttagaccattttacactatgccagatccagaagatccaaactattctaactcatatgatttctttatgagaggtgaagaaattctttctggtgctcaacgtatccatgatgctgaattattaaaggaaagaatgaacttccatggcgttgatccaaatggtccaggtgttgcagattatgttaatgcatttacttacggttgtgcacctcatgctggtggtggtattggtttagaaagagttttaatgttcttcttagatttaaagaacattagacgtgcttccttattcccaagagatccaaaacgtttacacccataagtgtttatttaatgtgtatataaactatataaaccatatatcttcaattattttataaacaattgttctgccatgggtaagttggttctttaacatcaatgtacagttggaagcggtataatgccgtgcgaagtaagtttaaatttctgtgatcggacaattaataaattttacgactcgaattattcatggtctctgcatgacattaaacttcgtcagctttctattgttgatcaagaaacaaatatttcaatgactggaaaggaaaataaagatggagatacatctagtgtaaataactctttgcagtttttatcattgaccgataattcagcttttagcaccccgaccgctacgaagaacattggatcagaaagtgtaatcgaagatgatgaatatcatgagaaacataatgatgaagtattagatgctgcacaaggtaaacattcaggacaatattttagttatggctcagcaaattcagcaatttctgttggtgaaggtgaaaagctattaaatccacatttctcatatagtgaagaacaaatgttgaaagatgaagatgccaaaatccgtgccttaaatacattagcatcatcacctagaaactctagatcctcatcagcaagttcacatgctcttagaagaccatctatggctgaattcatggttcctccaccaccttcaacattagctgttactccaaaaccatcaagatcaaactctaaattctcatataatccaactacacatgagatgacaccaaaatttaattcccaaactatgggacactcaccttctataagtcaaagagatccttttaatgctcaacaaacccacaaagttaaagagcatgattttaaacttggtagtattttagcaaatgatcataattcaattaatgacgaaccatcaaatgaattaatcgatatttataaacaaattaagtggtgtgttgatactagaaacaaatatcaaaccgtatctcttcaagaaccttctatgaatccaaaaaatcaagaaggttggaaaatctatcctaatccaccatctccattctggaaagcacaaaatcgtcgtaaaccagaaagtatagataaagaggataatccatatcatagagatgcaagagattttaagtttgaacaatgtgaaattcctggaccttgatccaaatgttgattttgttgcagatagtgaagacacctatcaaattgttgatgctaaaacaggtaataaactttgtcaaattccaacaattagagactactatatggatttggaaagaatcattaatattgcatcagatgggccaatgaaatcatttgcttttaaaagactacaatatcttgaagctagatggaacctttactacctgttaaacgatcatgaagaaacatcagaatctaagaaaaacccacatagagatttctataatgtaagaaaagttgatgtccatgttcatcattctgcttgtatgaaccaaaaacatttacttagatttatcaaacataaaattagacattctcctgatgaaaaagttattaaaagagatggtcaagttttaacattgcaacaagtttttgaatctttgaatttgacagcttatgatttaagtattgatactttagatatgcatgcacatagagacacattccacagatttgataagttcaacttgaaatataatccaatgggtgaatcaagattgagagaaatattcttgaaaactgataactatataaagggtgaatatttagctgaaataactaaagaagtttttgacgatttagaatcttccaaatatcaaatggcagaatatagaatatcaatttatggtagaagtccagatgaatgggataaattagcagcttgggttgttgataataaattgttttctcataatgttagatggttaattcaagttccaagattatacaatatttataaaagtagtggtttgataaatagtttcagagacattgttgataacttattcaagccattatttgaagttactaaaaacccacaatcacatccaaagttgcatgtgtttttacaaagagttattggatttgattctgtcgatgatgaatctaagactgatcagtagatttcacaaaaagtttccctttccaagtaactgggattcagaatataatccatcatattcatactatctttactacttatactcaaatatgacttcattaaaccaatggagaaaatctcgtggatttaacacatttgttttaagacctcattctggtgaagcaggtgatcctgaacatttaatttcagcatatttgacatctgagagtatcagtcatggtattctgttacgtaaagttccatttgttcaatacttatattatttaggccaaattggtattgcaatgtcaccattatctaacaatgctttattcttaacatatgacaaaaatccattcccatcatacttcaagcgtggtctgaatgtcgctttatctactgacgatccattacaattttcatatactagagaaccattaattgaagaatattcggttgctgcacaaatttggaaattatcaaatgttgatatgtcggaactggctaagaattctgttagaatgagtggatttgaatatgaattgaagaaacattggataggacacgaattttatctcgatggtgtggagggtaatgatattgaaaagacaaatgttccagatattcgtgtctcatatagaaaggaaaccttacaaactgaatttggtttgattgattattacactaagttaggatctgaatagattaataattttcaactctttgaatttttttaaaatgggtaattgtatagaaaatatataaaatctaatgatatataatgataatgctacagttgacttatatcgaaaccggttcgatgcttgattcgtaaccaaagattctgtaattattttcttcaattcgtttctggatatctcgtttgaacttatcgccgtacatgtcatattgaaagtttgatacatcaattggagtttttaactggttgatgttgtaaaaccacattctaaggtttttgaaaacaccattgtcataaggtttatcgtttattgttaatggaactatcaatcttaagtttggttcatgaggatgttgaacattcacatatgatgaataatcatagaaattttcattatttttatcacctttcttaagtgatcttttccaacttaatctatccaatcgttcaattgttgtttcgccataaaataaatcacttattaagttaatttccaattgtgcaacagatattgataatgcccctgtaattatcacaaatacaatcaatgctgaatgcattgaatgttttataccactataaacaaccactgtaatccatgtaaatatcattaatagttctatggacatcacataaatgataaaatatccatagttttgtttccctattgtagaacctacgaatgtgcagaaatgatcaaaccatggtatacactgattagtaactgaagaatgatggctcctgagtagttttaatgaacagcattcagagcaccatgagggcaaaccatttctatcacaatcaaacattggaggtggttgtatcattccaccatcttcttgggtatctagcattgaaagagatgaaaatgtctcatttttatgctcaaagttcaacttacttccattataaacaaattttgacaaactgtaaggaggtactttaaccagaatgtgacccggtttccttattaaaagtaaaaaccaaaataaaagagtaataaaccataatatattagctactgttatgaaagcaatcattgcatgtttattgccataaattttatagacatgttggtaacagaaaagataggaatacgcccattcactgaatgccatgtaaagaatcacacatgtgggcactaacaacctccagtatgaattctttgttagtatagtcatatcattgatgtgctgttattcccttggcgaaagaaagaagaatggctaagagaattaaaatttcaatgttcgttaacttaatataaataaagttgatgtaaatatcgttttttcatgaaaatatttcaattactatacaagagtttgtgaatagtctatgaattgcagtagatatacagtgctaactagaaaactataaacctttaagctgtgtaatagatacaagatttcgactgattgaaggccagttattctctaattttgttgatctgatctttaatttataatttttttctaatgccttgatatctgtaatctcttgtaaagaatcatcagttatatctaggaattcaccatcaattatagattttaaatgctcttgttgtgtttttgtgaaatcattatttaaagtttcactttccactattttaacaattaaaatactgtttgaatccttcgatataccaaatttattcaaacaatccatgatatttttaaacggtgataatgaatagattaattcagtatgtagagttcttgatttcatgtttccatcatgttgactcattacagttttgtaaaatccactgtataattgctctaaactaactacgttcttagcgtttataaacccatagtcgtaatctttattggcttttattagattttccttgatttcttgacaattctttacatttgatgcaaggaaacaaacagccttgtatttcttgtagacgggaacttctatctctctgaacggtattgcagatgacattattcttataaaagatacttctacttggatatctcaaaagaaaaaacttcctgcttgtgaacatgaatttgtgtcagttgaaactgaaattgaatctcgcagattaattttactgtttcttcatttatttcacttttgtttattttatacgttgatcatggataatctctgggccaatgctggtacacacgaagagaatgtttggggagacaattctagtagtattagtgtgaataacgatgaaattgatgatgaagttgaagaaacttataatgaaaacattaccccaacagaaagttctgatgaaaatgatgatgatgtcagtgaaatggtgaacgtggaagattctgcaaatagtgtatcagtatgggctgagaatgctgatcttggtgaacacactgataatatatgggttgcagactcgaatattaaacatataagtgataaaagttttgaaaagataccatcaattgaaacaaataaagttgggcagtcggtaatcagaccttcatctaatgaaaatactgatgatgatgaacaacacatagaagaggaagtttctaattttcaagatgatgacaatgatgacgatgatgcagattttggtgattttgaggagattgcagaaattactattgagtttggaaagccaattgaaagtataatctcacaaatatttccaaattcagagaaccgtatatcgttgtcaaaagaagatattaacaaatcttgctttcttcttgaaggggggaataagccaatgaaatgttacaatacaattactgcaagcaataggcagtttttcattcaaaacttggaagtaatgaacacacatcaaagaggatgtatgaacaaatcaataacccaaaaggaattagttagtatcgctaacgattgggtttttagtgataaaggatttcatagagaaggacatagaaagtccaactctcaattatgggatggaaatgatcaaaagaataatatatttcgatggtctagtaaatttgaaaagaatgagaaagagaatgaaaatatcgttaaggtagagaataaacctaacatatctcaaaagcttttgaactctgcttacatggaagctagaaaattaattgataaacgacttgatcaagaaaaggaagaaaggattgcattagaaacgttgagaaaagaaagagaaaaaaggctacgagaagcaaggattaaaaaggaagaggagatggccaaatataaacttgaaaacggtgataaggttacagatagcaaaaagaaaggattttttggaaagatgtttcaaggtaaaagtaaaatatcgaaagatcacatttcacatactaaaatagctagtcctgaggcagatcaagtttccaatgatcatgatctttccttaaaagagatgatggaaaaggatggatacactttctctagcactggaaataaaaggcatagttttagaaagcgtaaaggtcatgtgaaagacaaaaagattgacgatgatgatgatgatgatgatgatgatgatgatgatgatgatgaaaacgatgatgatgatgataataatgttaattttcaacaaaattatggtttactaactgaaactgtttcagatcaggttttcgaagagaattttcagaatgatgatcatgatttgtttggtaataacataaatgaagaatttaaagagctagatgaagataaaataatgggaaacaaaacaattgagtcaacctcacataaaaaagaacaagcaattcagaaaactatcgataataataagcatgacatgggtgatgattataatgataatgaatttaaggagtttgcggaaatagatgaaccgacagattcttcaaaccaaagttttgaaaattcaaatagaaacaataatacctctggtgataaaagtgtcaacttaattgatctatagtcaatttaaagagcaagaaatatcatatttaacatcgtatctatttcagtagaaatttcaaaggattattatttttcaatttaatcttttttgtatcatatttacagggaaactggaactatagaactttatataataaaaattagaaaacaatatatgcggaacattaggatcagtttgatctaaataattatttagcttcttgctttgggaaatagtcataaaaccaaatctgtcttggaggatattctgttggaactctaagttctaatgggaatcttttaccgtattgatgttcattagcaatttcgaaaagttcaggacttaaattttgtaattcactgacagcttctttcatagattcgtattgtttttgtaaaagtgtttcattttcttgtattttagcttttctgtaatgtgaccatgccttcatgacagttttatgtttaacataatcttcattacaaagtttcaaaagtcttggttgttttcttccagctgacatcacagaaagttgactgacaattctttcaagttgtgggttaagaccagacttgtctcttttgtatctgacctgttgagtaggtttaatgtgtgatactacccttattgcagctctagatgtgtacattgtccttgtgtaattatgctccttagaataaccgtccttcttcagactcttcagtattgtaagaaaagtgaaatttcatgaaagaaaaactgtatttttccacaattagcaatttttcaatttttatatgaaggtcgctaagacgagaatttttgcttaggttcatgataagatcaggataatgtttctaggcatggtcaacctgaatttctatcaattcagcaaggacaagaagtagaccactgcatggatttggaaaatacatctgattcaattaaaactaatccgttctatgaattagcgttaaaggaacgtcgacataatttgcaggcaaatgatcatgagataaaaggaaaccagcaaaatgcggataagcctccattgaatgctaatccaacagtcgcaattgcaaataatgattcaaacacaggagtacatgattcaatgaatgactacataaatagtcataattctaaggtagtagaaaatgaaaaaaaatgtgataatggcaaagaacaaatatcagttaactcaaatatgaatgattatacattaaagaatatggagtcccttaatagaaatgacaataattatagtgatagtgatgatgacgatgaagaaaatgatgaattgcctttgatggacatttctcctcttgctatgcaaaaacttaaaagtgcattatcaaaatcatcagtttctttggattctacaactaatggcagtgttgcatcgatccctgtaacatttgttggaggttcaaatcccaacaattataactcagttgaaaatacaacaaatcaatatttaaataattcaaatataattggaactatctcagcacctaaaggtaatgatgacacacaattgaataatgacaataccacaaataaaaccaatatctcctctgtcaatatacctcagagagaagaaattccaactcctgttttacctactagaccacctcagctgcctgaaagaaaacagaggaatccattctacaaaaaggtttccagtttggatccggggtcaatatcaacagttgcatcacattctttccttgtcaatgcaaactcacccgattatgctgaacgcaaacggtcaaattcatatagtagaagacatctgccttcaatatcaccaacgctcgctgaacgtccatcaaataaacttactattactattcgaaacgatacttcctcagtattttcaaatgatcttactccagttgaatcgaatacccccaaattaactcctactgactcatttgataatattaaattacctgatactcaatcctcaagtgaaacaatgtattcaacttctgttttgaaaaatacccattcaactccaatcatcaaaatatcgggtatagaagatgaaataaactctgcaccaccactacctaaaaagccacaactaccaaagaaacctcaaagcttcagcaataacaaccatgcttcggctcatgaattgttggagaattataaccgtagagcttctttgtctagtgtcaacagttcggtcttttcagtgaataattcattggataatgacttggatttacaaagtttaaaaaatcttggtatcactgatgagatgatcagacagcaaaaagaaatagaagaacgtattgcggaagaaaatagatcatcaacaagaaggggatctaccgtgtcacatccagaaagtagttcatcatttgcagatagatccgaattttcaaatatatcaatcaatgaaaacagttcaatgcattcagatcaaagtgaggaattacctgatgatatatcacaattagaaataccaactaacttgtcaagaagtcaaagtttattatcgaatacaggaaattctgaaacacagtccattcaaagtagtagtattattccagatcctgttagtttaaatgcagacataactgaagaggagtttattagtttattacctcctgttccaaagtataaaactattgctgatgaaacagaactttcagtaccaaatggtaaagcaattaatattgtaatgataaatgataatcaaggagaagaaaaaccaccagaatatactcctgtatctgaggctctaaagaagattgttagaagaccacaattctctcaaacaggtggtgataaccaaagtgtaagaagaagagaacaagagcagttacaacaacaacagttgcagcatttagatcgtttaacttctggtacacacggattgccttctcttccaccaagaagaagaaattccagaaattcttcaagtcaatctttattaaatagaaactacccagcaatatagctagttttcttgatttttttgtgtagtattgtatctatttgtaccattaataatatatatatatatatatatttatgtaacttacatgctataaaataagcaaaaaaaagtaaaaagcacgtttttttatagaataactgagtctttaatcaaccaatttaatatttttcaatttatcattctctaattgagttcaatgcaacattttttatccctttttgtgatgttttttctgtattgcaattcaataaaaagatattttaagtatttcaacaaaaaataccaataataaagcccgaaggtaaattatgttgattaaagttacaccacggtaattttttttttattcattttattaaaatacacaaatttctacaatttaattacatgtacgcatatattatttatgctttatcaatttaatacatcttaatatactaaactaaaggtaaattgagttatttacgcgatcccttttttttttttacattaatttcattaaaatatacaattttatacagattgattacttatacgcatatattattcatgcttcatcaattcaatatatcttcatatactgaactaaatgtaaattatttctgtttgattattctcaatctttttcatctaatttagatctaataagaactaaatttttcatatttgaatagcaaatatgtatctttaatatatctttttgttatcctaaactctggatcattcttattgcttttgtagcattgtttgttaaaaaatataattaacttgattattatatttgctttataagcatctttctttgttgatattaaaccaacaatattctttagatcaatttttatctctaattcttttagaattatttcaattcctttacagttgaaaaagacatgatgagtcccaccttccccttcgcagaattggcaagggtgataaaaatgggaattcaacattcctgtttgtaattcaaataattcattataatcaacatggttttgattggtgattctacccaaccaagcaaagcatgtttcccaatccagttgatggtctagtttgccatcccaataatcagcattaaatttatttttaaattcttctttgtaaaatcttttagaaaagtgtttaaatgattcaacattgatttcctgatttttattgaaaatttctacaattttccatttttgaacatttttttctaccattgaaaataacgatgttgcattgaaatctgtagtttctttaacctgaaaatctgagtgaatattagttaaataataccatccttgtaaatatgggaaaatattagagtacaccattaatggtgctaatgtttttgaagaagcttcatccatgttgtaattcacagggtgttcgataatgaaattgatatttggttcaagatcgattattattttccctgtatttacatttattattttaggttttgcaacctttgacatttcatttgaaagagtttcttcaatagtaatattacttccccatattttatgatttttatgcagaagaagactgaacggatatgttgaaatcaatccatttgaaatagtgcctggtatttttatttttggtaaagttccaggtacagctctatttgttaatatgtaattttcgacatatctataataacaatggtatgcataatgatttctgatcataacattaataattccttgtaatgagtgtgagattattaatgtcaaaggatgttcatttataaattttaaattctgtttaatagtcgttatgtaaatgaaatatgctcttctaccttgaagttgtttaccaaggtcgatcagacccatacccccatttttgtgaggttgatgccatttgattcttctaactgcaattttcagcggtaaatatttaactaattcttttttaacataattttcaaaagaatttaaaagaggatccggaattggatcatgttgatcaaaataatagatagtggaatagatgtaagtattaacagctactactctttgatttaaatttagatctaaaaacatagttttccttagtcttgttttcaattggtttattttattgtaccagttgattttcaacaagggaattcctagatagataggattttctttgatatctaaaattgatagcttcaattgatttatattagcaaattgtttgatattattgatacctttattattaataaaaattattgatttcttttcatttattttaagatccgaaatttgagcaaaattatttaaaattgatagtgattttaatagttcattattgttctggtgaaacagacatatatcatcagcaaaagctagaatattgataaaaagcttagcatttaaacctctctcattgtatggattgtatttcattcctctaattgattgatggagtttaataatcagtggttgtattgcaagattgaatatcaggggtgagaaaggtaaaccttgtcttacacctctccttaatggaatattaaatttatggatccaattttgattaactatattagccgatgctaacctagattggttaatagttgcttcaatagttgaattagggaacccaaatttttctaagatctttttaagatattgatgatcaatagaatcgaaagcttttttcaagtctactaataatatatgttgttcattggataatgatggtgatgaattgatttgattagcaagaatccttgcagtttcaatatgtaaatgaatatttctgtgaagcataaatgcttgttgatgatgggaaataatcctgtttgcaataggcattattctattagaaatagaaaagttgattaatctaagtgatgaatttgtaagactgataggacgtagatcatctattaatggaagatcttgtcggtaactctttttgggaattaattttatcaatactttaccaatcttatcagttgtggttaaattgccttgaagaatataatttgccatgttggttagaatcacagcagcagaaacccagttgtttttccaatctctgtaagtaataccatcagtccctggtgatgatggaccattttcatttagccttagaaggtttttatatatctcttgttttgaaaaaggtttaattaaatcatttttctctttctcagttaattgttctttaatattttcagtgaacttgtcaaatttgttatttaaattttgatttgaataaatttcatttgatgcgaaaagatttgaataaaatgaatttgcatcatttataatattttcatccaaatttgcttcatttgaatgttttccaaatctaagtctaagtctcttgaagttttttgagagattagctgagatattattgaattgaggatcattaaaatcaaatcctaattctttagatgatattttttccttatatgaaggtaaatgtttcattatctgaattactttatttgttttccagcaaactctttgcatatatgcattataatccattgatgggtttttagtatccagaatctcattggtgaaaatgtatttatataattgtttattttcaataatgtaatcaggaattgatggtattcttttgtaaaaattatctttattaattatattattattagaatttgaattgatatctgataatgtacatactaccggtctatgtgttgtaaacggtagcttttgatgtactctatatttaaaattgatatttcttagcagattgaaggaaacatggaaacggtctagccgattatttgttccatttgaaccgtggttggtgtaacatatacttcttctattatttggaaggaagaaaatatcatataaattattttccattaattgttgatgaagaaatgattcaatacgatttaaatttgttgcttccataggatgtgtattccaatcaccacaaatgattagattattttcaccacgagataatgatgataaagttggacataatgtgtcaataaaatcttttttgttaatgcagtggaatctgttatcattaacattattgtaaactggtacataaacagagatgatagttaagttttcttgtttgaaatttattgttatatcacagacataaaagtttgcaagttgattatcacgattatgccttggaaaaatattatttgaaatgatttctattgaagaatggtaaataattgctgttcgatgttgaacagattgaatcgcaattttgaaatcgaaattggataataattgttgaattgaagataattcagttgattgatttagatcaaattctgtaagacacataatttgaatttttttattttttgcataatttagaatatgaattaatttagaaggactagttgccttctgaatattaaaatttaaaatttttaacttattcattatgatattttatattttttttttaatttttatatttttatattttattaaacttgaagaattaaatgaattagacttgtgagtctaaatccatttgagatttctttttttcaagtttctcttttctttctaatgccatttctatttttttagcatctaataatgtaccagttgctacactcttaccttgtttagaagatttaactaatgttctgacatttctaggttgagttggagtttttggcatacttcttgtagtttcggcatgcttagtttcaacaaccatatcttctatctcttcatcactatggatgttttcatcttcatttggaatttctggatcatccacattttccaatacttggaaaggattgaccgcattatcaacgttactgactattgatgatgatgaatctgacctagataagttcttaggtttagatggaatagagaagccatctgaatctactttgtcattattaataacaacagctgcatctagatttaaaatgtttgtagaggtttgggctctacttcttttcccattaccatttgtagttgatgttcttggagtaacaggagcgtaaaatacttgatcattaaccgttgcgtttctaattctcaatgcccacattggtaatgatcttgagagagtttttttgaagaaattctctcttgtttttgggtggagggaattaaataacctttcttgttcagcctccgatgattttggacagaaaatttctctgtgaccattctttggaatttcaccttctttgaccttatgtctagggttgtaacatcttctacaacttggtttcattggacatctagctgtagtgtggtctgtacatctgcagtatacacaatgtgtaggtgcagtagacaagtaagtgatgatggggattttatgtgtttttccacctgttgtgtgtgagatggaatgaattttaggtggtaaaactgatgattttagttttaacactgtgtaaataattttattttgttcgtagaacttcatattgatagaaactaattgtaataattccatcggtggttcagccaatggtaggttaatttttaaactgtatttatcagtattaaacatgtttgcaccttcttccattgtattctcagttggtgcatcaattggtttgctcatattattatgaactttgttgatttttttatttttaataatattattgttgttgttatctttgcttttgtaataatcttcaaagataaattgaaactctttgtgcatttctgctaaatttgtagtattaatatttctttctaattcttttaagaaagaggataagatttcttgtaatttttcaaggtctaaaaattgatctttgccaacttttagaaagtatgaaaggtgataaagatgatctttatcaaccgtaatatttgcctccgtaattgttttatggagtttttgagccaacgtcatggttggttgaggttctgcatttacctcttggactacttcatcttcctcagcgcaatcttgaaattcaatatcttcatcttcgtcttgagtttcatggtcagtttggttcaaaccttcgttttctttttcttcagcaaagactgaaggtaacttgttgaactcaccatggggtaagttgggcggtttagtaacgttttgagggtcgggaggacctgaatcgtcgattgtagtagcttttagggcccctttttcacgtgaccaatgtgcagcaactgtatctattattgtaggcttgttactataacaatctccgatatagtgtaatggctatcacggtccgctttcaccgggcagacccgggttcgattcccggtatcggaatatttttttgctaattttaaaacgataaaagtgtatttacctaaaatgaaataaagtcttggtactcaaaaaacctgtttctcctggaaaaagacttcgattttttagaagtcttcacactttgatagcatagctgtacccaaggtatgatttcaagttactgatagaagatgaagactcagtgtaaaatatcggcatacattgatattcctagccgcaaatttactatggataaggagcgccattttcccaaaagagtaattgccgttgacgataagagtattgacacttcttcgatatactaaatttaactgtttctattatactttgaaggtggataaagtccaaattcaaaaaagtataaaattgggaatcattccttttaatttcgttaagtgaacttgtattattttcattttttttcttctctttccattaacatcaaacaaattaaaaataattaattataatgactgttgaaactaaaacaaaatcctatgttttccaaaagaagatttctgaaaaaggtcttatctgtgtcggtgctaagaatgatggtatgtacttagttttagaagatccagcaactggtgaacaaaaagttgtccttgatggtgtttctggtgcagctgtctgttccttaggtcacactgatcctgaaattaccagtcaattctctaaatgggcatctgaaagtccatataccttcggtgcatactatggtaacaactctgctgaagatttaggtgaatttatgtgtaatagatccaatggtgcatttgaatcttgtctttggactcaatcaggttccgaagcaactgaaaatgcaatcaaacttatgagacaataccatttagaaagaggtgatggtaagagatataaaattatttcaagattacaatcatatcacggttttactattggtgctttatctgttggtgatggtactagaaaaccaccttttaaaccaattttattaagtgatgaacaaactccaaagatgcctcaactttatccatacagagattggaaagaaggtatgactgaagaagaatacactaatcacttattagaacaagcagaaaaagttttcatcgataacgatccttctaccatttctggtgttattgttgaaaccgttggtggttcaactattggtactccgactccaccaaagggttatttagatggtttaaaggcactttgtcacaaatatggtgcattattcatgttggatgaagttatgtgtggtttaggtagatgtggttacgattttacttggatgcacccagaatttggtttaactactggtggtccagatcttttatctgttggtaaaactattggttccggtttcgttaccttagctggtttattcttttctccaaaattctgtaagacattcaatgaaggtactggttacatcatgggtggtcaaacatatcactcacatgcattcacttgtagagttggtttagcagttcaacaaaaaattgttagagacaatttagttgaaaatgttagagttgttggtggttacatgaaagaacaattaaaggaacaattaaaggattgtaaaattgcaggtgatgttagaggtgctggtaacttcctttctgtcgaagctgttaaagataaggcaaccaaagaatcctttgatcctaaattagctgttggtccaacccttcacaagagaattttcgacaagggtgttattgtcatgggtgcaaacggtactaccggttatgaataccaaggtttaacagatgttacctgttttggtgaccacgttaccatgggtccagctttcacaaccaccaaagaacatgcagatattattatcaaggccgttgtcgaggctttctacgaacttgaaaaagaattattataatcttgtcctattctttctggtttttttataatgattttccttatttaaaaatagcaattaataaatttttttgaaaatccaatcaatctaattttctatacagttatcttatttcttttcaggtaatcatttattctatctgtaacacttatatcattccacaattcatttttatcagaatcataactgacttttggcaaaccatattgctcaatacatgcaccactagcaatcgttgcatagacacatgatttcctataatctctatcatatttcacaaaggcagttgcaaatgctccaacaaaagtattaccacatccagtcggatcaatcactttattctgatccccttcaattttttcatgaaatgcaggaaaccactcaatggctttatcttcacttcgtatataaaaacttccaagttttccacaacgtagaactataccacttccaggtttactcatgtagtcgataaactttctggctatacgttcacaattgatcttatcagttggctctttctctccaaaaaaggctgcacattcagcagcatttggagtcagaatatcaatttgagataatattttaattgtagcgtccagatattctggcgaacaacaatcgggtataggttcccaagcgataacaacatctttgtgagtttctgaaacagcactcaattcttccattaattcagtgcatctattcggagagcaaacaaaatggaaagatttactgtttaacatccacggataagtttttagatcagtaattgtgactctttttttaggtgttaaatacttaaatgatctgaattcattttcatcataaccattccaacctctggtacattttcttgaaaaatcaaatctgaaaacccctccagtattccatgattttaattcacttaatatttcgtcagggcaatcattacctatatcaattatccaagcacatttatcagattcctttgatcctaaaaccattcttgatccgcatattgcaaatgttccaccacctcctagaattccatcaattttcaaatccggaaagtttatttcatcaataataaacatccccaaagatgtaaacaccggattagaatgcgttcccttgatcattgtgcatatatgctattccgagaatatacttctccaacttcaagataaagagtttatgttgttgaggcaacacaaaaatttcatggcacaaaaaaattttgatttcatgttaaaatttgctggaatacaattgtagctttcttgtcttttgtactttacagatcaacatgcatgaacaatgagtgaatttgatcagaagaagaaatttttgcttaaagaaattggtttgaactccgaagaaaatccagatgcatctccaaagggtactatagattcattatgtattccattaatcactatgataaattctcataaagatatggttacaacatcttcatgttcaggaagattgtctgtcttcctggaaggttcaaaagatgttaaactagtagatgaaggtactagagaaaatataaagattggtgcaaagggtgatggtggtcattggttgtttgtctcccatgaaaaagaggaaatcaaggaatggtggaaaagtgaaaatattaagtttaaatataaaactgctatcaaagaaggagaatataatccaaacacaagatacgttttgttcaaatatgaacctttgattttacatgttaaatgtcgtgatctcagttcggcttctaaattatacagcaccgccatgggatgtggattccgtgaatctggtattggtgccaataataatgttgcaataagaatttccatcagattagacattccaataggatttttagacaacgagactgatgatatcttatgtacagtagatgagtcatacattaaaatggttactaagcttgcatatgatagatttttagaaaatgaaagaaagttggatttactttatgaaagaatagaaaaagaaataatcaattctgttttcacaacagaagtcaaagaaacgaaggaggaaagaaaagaaagaaagatgagagagggacttgctagaagagacgatgtacgtaagttaaaggaagagaagagaaggttaaaacagctacaattagaacaacagaagagtgaagagggaagcaaaactaacgaagaataattattatatttatagacaactattataaataacgatctgtatattagagtttataaggtactgtttccttaaggaagttaatatcagttatatcacgagtggtatttttggtgactctccaacttgcagcagctggatcaaccattttgtcatttagtcttgatgtccatttccaattttccttcatatcactttcaaggttatcatctaccatttgaataatgtacttaccaatattaggaaagaatttgtaaccatgaccagagtcaccagtggcaatgtataagttagtgaatcctggaactttgtctattaggaaatgtgacttttctgtatccccataccagcatactctaaatccaaacagattatgacttttcaatgatggtgcatatttatttagcagttgacgaaaatcatcaacaaactcttcaggaattgtatccgtaggattttcattgtgatatcttggcaatgatatctgagtattggaattgaatggatcatttatacttctctttatacctcgacctgttaagcaaagtttcattatctttgtcaaaggatcaggaggaaagaagtaaccaatttcagcatcaaacaacactggaatgtttttgtaaatatcaaattcttcatcagttaactgtatatgtgtaacaaaagctccagttgccgattgttgattctctaaattcaatactgatccagaattagcacccatagccaatatcacagtacttgcactatgagtatatcccgaggctgtaacgataccaacttcaccatttgaataacgtttaacagaaaccacatcccctgattctccaaaaacaaatctgactctaggatgtgataagaggtattcatagacatctttaattgtttgagctgctaatcctaatccaccttctggattatacttaacttcttgattagaaggaacatcattatctttaaatccttcaaatttgttaccaatttccaaaccacctttataaaactcatattttaaaccttcatcaagtgaacgtaaagtttcaataccttttctttcaaattccaatctacccttatgattcataggtgaaattagtatacgaccacattcattaaatgattttttgaagagaggatctgatctccaaagatgaagtgcttcaatagccattttagcatacatttcatcattatattcacatcttataattttattgaaatcattagcagctgaccagggggaaggtggttcatatttatcaagaatataaacaaatttcccctgttttacagcctctaaagcagtcgataacccaaatacaccacaaccaacaatcaaaactggaccatccaccatatttgcagctaaaacaacctataatgatcaccgtaaagctttgttcaagagaagaaaatggtttcaacggtgttcaagataagagtcgctgatatgaagatcgggctgtttcattggtttgatttttatttctatttctacacaattattaaatattaagtattatataagatattggacagcttatttacttaggagcagatgcatctgctggagttgactctttttcaagaaactctgtccaaagcgatacaaaagattgtgaactagtttcagaattttgacgatcaggatgtggtacctcaaccacactacttgatcttgatgtaaagtttcctgatgatataagacctgcatgtctcttcttttcatcatcccaatctaaaaagtttgctaataattgtaaaacttcaaattttttggtatcacctcttgggatttgtaagaaactaataaataaattggaaacaagttctctatcaacagtttctttacctgtttcctttttaattagttttaatgctttagttaaatgttcatttaatgtaattgtttcatgtcttaatttaccaataagtaattgtttttcctttaagttattctctagttctggtaatttactcaattgattattcttctcagctatctctgattttagttcattgatttcatcagtaaaatcatttaattgattaactttatcttctaattgtgatttaacattagagacaattttctcattttcatttttcagatcttcaatctttttgttcaattcaacaatactttgcttaagtttagaatattttgcctctaattcaacattttcattttgactattttcaagctttatttttaaatcattcaattcatgatttagatttgttttattcattttttcttcttgcagtaatatcaaatattcatccaaattagattttgattcccttaattcttttttcaatgatttattttcatcttcaatttttttgttattgttttctaattggaaatcttgagtttctaatgtgtttttcaattcagtatttttatctgtaagtttatcacattctgagtttaaattaacaatttcagaattaagctcctttaatgttttttcaaggtttaaaattttggtattggttgtctcaagtttagccttcaattcaacattttctcgttcagttgtttcaagtttagattctgattctttcattttagtaaatatagttttcatttgtgagactttactgagtaatgtgttataattatctttatatttattactttcttcagtctttgaagccaattgtcgttttaactcctctacttctggagattcacctaaaggagtccttctcttcagataatttaacttctttagttattgtgactattttcttgtctaaagattcaatcttttcatctttctccttgattatttcttcaaatttaaagtttgattcctccaatctttttttcaaagcttcaatctcctcctttaatccattgttctcagtttccagtacctttaaatcatcattatcagtatttacagtgccattcacaattgatgattcttcaatgcctgtaccttctttgacttctgccaaaacagcttcttcctcaactggcacttcttgttcttgatcttgtacttcttcaatatcatctaccttcacatcattctcaagcacagtttccttagcttcattattttgcttcttcgatttcttcttagaacctttcctcattgtaattgctctatgtactatacgctatatagcttccaaagtgctgttccttcgttgtgaagaatggtgaagctggtcgtggaaaatcgcactttccatgggggtttacacgtataccaatatttttttcattttatcatgtttttccttgatgtttattaagtgaaggtgaaggatctgtatttggtacatatctggtcaattaattgatatataacagtcagcatggatgtttctacggtaattgttctatttgtgggtgtgttgataagattgggaacattttatttagtgcccaacttgtctaaagtgctagatcaatttgtcatgttttcaacacctgtaaattcatatagatcacttaatgaaggtattttccttttatctaacaatttgaatccatacactaatggtgaaatcattcatcacccaccaattcttctttggttgtttaaaatcttgaaagaatcaaatatagaggataattttaatacctgatttattttattcattaatggatttgttaatgtgtttacaattaatcaagataaataggaaagtcaatgggaaggatggattctcttcattgaaaattgcttgctttcatatgtttaatccatttacattattaacaacattttccaaatctacacacatcatcaataacttattagtcatatctgttagtagttgtttggttcaagataaatttgaagcagcaattattttattaggattatcatcatatctcacatattatagttggtatcttttaataccgatttgttactatttatacgtcaataagggtatttctaaagttattaaaactataattttattttcattaacattatctgttttaataggaataagttataaattaagtgatgattcatttaattttattaacttatgttacagtacaattctcagatttaagaagattacaccaaattcaggattatggtggtattttttcaccgaaatttttgaattctttaatgatttttatcttgcagttttcaatatttatggattaatatttgttttaccattatcaattagatttattaaatcatatgaaaagatgaatttattatttgttttatggatttgtgttggtttaatcaattttgcaaaatcatatccaattttcgcagattatacattgttttattcatcaattttcttgttcaaaaaatattattctaatttaaaatttagtccaataattgattatttattcctatatgttgttttattacaggctccaactttttatgttgtttggatggtattgagttcaggtaatgctaattttttttatgcaattggattaacattagcattgttagaatcaattatattaagtgattttatttggtcatttattcaatctgagtattatttaaatcataaattggatacaaaggaagataatgtacctccaaaacttactcaaatttaatttcgaaaagctattactatagatatagattttgttatataacttaacctttattcgtctttttacataatttataaataattttcttttgttgatatatgttatgattatattactgaataatcattcaatcatttgtttcgtgaactgtaatttaagtgtctcgatctgtgacctatttcattaaggttagctaataattcttccattacttttttactttcactgatttcattttcacttttctttaaatcattctttaacgaacttaaaatattctcctctttattaatttcagtattatcattctttaaatcttcaatttttatatataattcttcattagattcttttaattttattatttgagattctgattcaatagttgatttctctgcacgttctatttcttctttcatatatttattttcatttttattactatccaatttaccctgtaattttttaatttcctctaataattcatacctttcaaaattctttaacatttctttattttctgaattattactatcaattgaggaatcttttaatttttgaatattatcattataatcttttatttcattctttataatttcagttttagaagttatttcattaatttcatcatcagttaatttaagtttttcttcattttcctttaattcattatccaatttttcataagtttcaatcattatatcaaaattttttatccttatattattaaattttttaaaactatcaatttcttcattaattttaattgttttagttaatgttgtatcaaattgataaattaatgtatgagttgtaatttcattttgactaacttgttttgatataccagttaaattttcataatctttatttaatggattcattaaataatttttctctaatcttttattttgataataattttgtataattggatttttctttgaaaatcttggttgaattatatgattaatcattttagttttaccaccaaaatatgaattaaaactttctttaatatcttgtctattttcttcttcctcttttaaaatttcttcattatcaaaattaaatttaacttctgttaataatgatctttcaacatcttttgaattaaaatttcttattggtggtaaatcaggtaatggccatttattaattaaaggatttgaaaaataatctttaatgaaaattaaatttttagtatatgcaggttttaaatttgaaggtaattgaccaactctatctcttaatacaacaacagcagcagttattggtcttaaatattcatcaattgatcttgaattagtttgattttggaagtaaagttctatatgttcaactgaataaattggtattaattggaaaaatttagttttcctaaaatcaattaatttatttaaaaattgattattttgatcaatatttgaatcaaaataaattataaaattcatcttttttttaaaattatttaaattagtggaaatttccttttcatttaaattttcaaattctgatgggaataaatgaatatttaaatttaaatttaaatttttcttttgatttgctgatgaatctcttaatttaatacctgaatattttttcaaattacatctatgtccaatacataaagcatcaaccaaatccattgctttacctgatctaacaataattgcaatatcaatatttttaccctttttagatttatcatttttatcaattggattataaattgaatctaattgaattaataaatcatttaaaatttgaaatttaccacttgtttcagctaatctattcggtaaatctcttgttgttaaacttttcgggaaaaaatgattaattaataaataaggatgtaaacaaactaattttatatttgaaatcattgtctctaatgaagttattataatttctttacgactttcattcattgaataccataatttattatctaatttttcgaaaaatcttaaaatatcactataatgtaaagaaattatttgatcaactaattctttttggaaatcactcattggagttgcaattttataaatatttgaattttgatattctggatcaattttaaaatgattaacatcaacaatacatggttcaggttttgcatctaaaattcttagtaaatccatatttttttatactttattatttatccgagttggttcaaatttatttttatcctttttttctttgatatttattataattatgattctttttcttttaaagtaaatgattttctatctctatctagataactactttcgataagttctaaagacaatactttataatcagatagaagataaaagaaagtataataaggaaacagtgaaataaagtggtattaaagttcatccgcgatttaaggtgttgatgaaattaaatcattgccgtttaagttaatataacagtacagtataagagaaggtatagaaggtatagaaggtatagaaggtatagaaggtatagaatgagtgataatagtttaacagccgatgagattagtttatatgatagacagattcgtctttgggggatggcagctcagacatcattaagaaattctaatatattagttattaatatgagtggagttggagttgaaataattaaaaatttaacattaggtggtattggtaaattaacaattattgataataataaattaaaggaacaagatttaaattgtaattttttcgttgaaaaggatcaaattggtgaatttaaagtaaatgcatcaaaattaaagattcaagatatgaatccaagggttaaaattgaaattgataataggaattgggaagatttagaaattgaagaatttaaaaaatttcaaataattatatcaactggattaaattcaaggcaaatatctaaaattgatggaattagtagagaattaaatataccaatgataacatgttgtgttcatggtattaatggttttatatttaatgatttaattaaaaatttaagttggattaaagttgaatttaatgaaaatagagaaattggtgaatttaatttagttagtaatatagttaaaattgatgaaattatagaaaatgataataaatttcataaacttttaattgagaataaatttaggaaatgggatgaattaaatggtaaatttttaaatttacaatttccaagtgataaaaagaaaaagaagaaaattaatatattattaattatgattttatcattattagatatgaatgaagaattttatggtaaagatattgaagatgttatgattgatttggaagaatttaaattacatattaatgaaaatttaaataaatttgaattaccgaaaagtttaatagaatttggaaatgaaaaatttgatgaatatttaaaaatatttattagaaatgcatattgtgaatatcaaccaagtaattcaattattggaggagttgttgcacaagatgtaattaatacaattgttcaaaaggaacttgcaattaataatgtttcaatacttgatggatttaatagtgaaatgccagtttatatattatagaatattatagagaattttattaaattttaaataattttacacttctatcccaaccaccagtaaatattgtaagatctgtattattattattattattatcatcattttctataatttctaatgacataattttatctaaagtatttaattttttaaaagtaatccaattatcacaagaagttaaagataaattaccatcataaccagttgataataaagtttcattattagaatttgtaaatttaatatttgtaattaatttattatgagagagtacattagataattttttcatcattctaatatcccaaataattaattgattatcagaaccacctgaagctaaatgataaccatttaatctccaatctaatgaatgaattgaattagtatgatcattttgattttcatttaaatttaaaattaaattacctgatcttaaatcccataatttaagaattgaatcattaccagcagaagctaataatgaaccatcaggatgataagataatgaattaataatatctgaatgaccttcttgagtgaataattctttatttgtttcaatatcccataatttccaagtaaaatcagatgatgcagatgtaaaataattataagttggatgaaattttatatcattaattcttgaattattatgagcattaattgatataatatttgaaacttgatcaatttcttcattaaatggatttaaaattatattaattttaccatttgaaccaccagtaaataatgaattattgatattattccaagttgatgataggattttttcattatttaaattattaaaagttttcaaaattgataaatcaaatggatttaataaataaacattaccattccaagaggatacagctaaggaatttaaattattagaataagaaattgaagatgtaaatctatttgaaattatttgagatccctgtaatgataaatttgataatttattataaatggaacgtctaaattttaaattatttaaattattaaaatttttctgtaaatcatattgtaatttaagtcttttattagccttttcaaatgaataattttttatattagaacgaatgttgaataatatatcaggacctggagtatagaaatcttcattatcatcaatatcatcatcagaagacatagtttagtggaatgaaatatgtaccttttaatcctttaaacctttactcttctctttataatagattcatgcatgttattaaaatacttatatccttaaatccgagaaagataatgatcggatataagaagataaaacattacgtaataaagcattacgtaatacgtaatgtataatttccggaataccttgattttcgacaagacgtaattctgtataattatagttttaatatttacttgtcgtaacaaggtagtgattaatttgtaataataattcttgataattaataagtataaaataagtataaaataatgtgtaaataatagtaataataataataaatgtaataataaaataatggttgcttaatgtgcatataggataaacaattactttagcgacgcgtctaatgggatcttaatcagaataccataatacttacctccccgaaaaaattgtatacccccttctattcaaccgtgttaaaagtttccttgaaaaattgtctttcttgatcaccaagtttagttgaaaaatcagcaattgatcttaagggagatccataatgttgaaaagctggtcttaaatgaataagattatgagtgttcttcataactttaccatcatgtccatataatttataggcatttttatctaaaacttcagcaactacaaacggaccttcgtaagatgggtcagttttagttttcttcattgacttctttaagtaaacaaattcgccaacactataaccattatgattgttctttggatcttctaataacttcaacatctttctagccttgaactttttattaccagttctttctcttaatgcagatagtttcttttgaccttctaatcttagaacataagcatcataaccaatgatatcatccttcaaagaaaattcctctaagagagaatttatatctaaaacgatatctaatgaactatctttgaaaaacttttgataaccgaaaaccagttcagcaggtgaaacatcaaaaattgtagttgaattattgtaacagtttaaagcatacatcagaacatctggccatttcttcatggtaatagtttgagatttaagtaacttttttaataatccattgactctttcaacctttgaattagcttgtggataataaacactagaaaaacgccatttaatatcaaatttctttgctacttcttgagtataataactaacaaatggaccaccgttatccgagacaattgtttgaggtactggaaaataaacaaacagatcctttaaaaatctaataactgtatcggcatcttgactttcttcaggagttgcaatacaataaccactaacatattcaacagcaactaacatgtatttacaatttgtttttgtttttgaatatgtgaccgatttcgtaggacctacgaagtcaatatgccaaagttccccaaaatttggagtcttcacttcttgcataacagcaggtaattcttgaaacctagtaaacaaatcacaatgatcacaattcttcacgacatctgaagcaattaattgacaacgtggatgaaaaatcctttctaataccatcaaatccattaacaaatttggagttccatgatgttttctatgccattcttcgaatagttgaatgcattcaccggccttgatcaccttaagcaacaaattttgatgaataaaatataaaacatcatccttaacaacaaataaagaaacaagtggttttaactcatgaaaaattttctcacgatcagaattttcttcttccattccctcgacatcaggattttcaattaactcggttaacatctccaatttttcatctgatagaccaccgaaatttcgaacttgttttgattgaaaaataatcttgtcctcctccatttcgtcatttggaaaacgaactgcacaacattgaatatgatcaatatcaagtaatggctgttcagtaattgaaaaacgacttacaaagtcagcataattcgtatttcctggaatatatttaattgttaagggatatgtggataaaatctctaaaaatttcaaaatcctattgttcaaagcacaattcacttgattgattgtagctaaagccttgtgatcagtaaaaacaacgatatcagttgaaagtaataggtaattgtgtgtcagtgccataataatacctaagagttctcgttctaatgttgaatatttctgttgtgtgaccgtgaaagacttagaataaaaagcaattggaattaacttctttggatccttatcccatttttgcagaaaaataccaccagcacccagatcactagcatcagtgtaaataaacagagtttcatttgggttaaataattgtaatccagttgaattaattaaggcctctttaataagggcaaaatttctatataatacaccttcctccacagttgaaatagtttttgactttaaacaagaatgatgttcatacaatggtttcaataataaagcacaatctggaatgaatgcacttaaaaaattcacgaaaccaatgaacttataccagtctttcattgttgtaggtaatttccagttcctaatggtcataaccttctcatcagttggaaatctcttaccatctttgattaaatatcctaaaaattcaattgaatcttcagccaatttaacctttttagctgttaatgttaatccgcatttgtctaattgtgttaaaattttatcaaccaaatccaaatgtgaatccttaccaactgatgcaattataatatcatcaagataacaaccaacataatgtagtttcgagtcatactgaatgtctttgagaacaaactgcataaaccttgtaaaaactgctggagcactagctaaaccgaaaggcaaccttttgtattcaaaattaccaaattgggtggtaataccaattctagcaccattttcatctaaaggaacattaaagtaggcactcttcaagtctaatgaagtgaaatgagagtaaccattcaaattctggattaataattgaattggaggaatcgcctcagttctaaactttaaagatttattaatttgtctaaaatctgtgaccactctaaccttatcatgttggatgataggaaaaactggtgctaaaacaactgaaccatcatcatcaatatctgatagaatattgttatctttaccttctttgatgaaatttagcacatgttttgcttggatggaattagcataaaacggtttaggtttctgataatcaaagttttctaattgaaccttataagtaaaaccgtgtgatggacttttcttaatagtatctttaaataattttggaaattttaacataatatcttccaagtatggtgttgttcctaactcagttaagctaatattctcgtcaccacaactaataaaatcaaaattcgatgtctgaatttcttctgttccaaaagttaaataactatggttctcatcaactctaaatttataataacctaatgaacccctaccaataattaattttggagtaccgttggcaggtaataataaacattttgcatgtaaaacaaattcatcaaaattaacatctaaataaaccatttctgaacaaacttcttcatctcctagagctgctttaactttataaaactttgataacttaaccttcttgataaattttacccactcaggtaagttgtccaaaaaatctttataaacaaaatcaacaactgcaccactatctaataaaacttttctttcttcattctgagttctattatttcctaaatggtaaacatctaattcgaataatgaaacaatgttatcgatattctcatcatcatcattttcttcaccttctgaatactgatcatcactaacatcactttcgttgattcctaatctttgttgaatgtttgaaaccaatttttcactatcatcattaacgtcgcaatcaaaattgcctccatcatgcaccaaatcaattgcattaatgttcttacgacccatgttaccattcttcttaccatgcttcttgtaggttgcaaagtttttggaacagtttctgcaattacaattttggcagaaatgttgattcttcttaaaacgattgggaatacccaaacgttttctttccttgcagttcttgcaatgacactcttcgcaccagaaaggattaacatcgtttgatctcttaggatacttcttttgattgtaaggagttgttgctaaagcattcactttcattgatgaaaaagaatctggaatgcgttccatacctaatctagtatagataaatcttctcaattctggtattttgtcaatttttgccagttcgtcggcatgctcaccatgtctatgctcatataaatattttctcaagtggttcttaacacgtctttctccacctttgataaaagagtatgatacactcaaattaacccaatccatgtagaagtttctaatagaaccatcatttggatatgtttctggaaatgtgtccagttctgtctccttcatggcgtcgtatttgtcaaaattaaatctagagaatgtataacaaagcaattgaatgtaatcttggtattcaccagtttctgattctgggtaatttcttaaaatagtggttttgtagaaattacaccattttgtgaatggaacacctttcaacgctagcaattgttgaaactttttggtagcagttacaatttgttggtcggttggcctttttggtaaagcctcacgaatcaattcacttgcgatcttcgcttcatctaatctgccctcctggtagaaaatttctttcacaatacggttctgtaaccaaatctcttcaaacatatatttttggatattcttcaaaacatcacttaacacatcgataggttcttcgacactgttaacactagtaaaattcctactgttagccatttgaagcttcttatccatttctgcaagataatattgaaatctggattcatcaattctaacacctggggttgtttctgctgcttttaacttcttgtccatctcagctaaatagtactcgaactgagatgtgtcgatcctggttcctggatttgaccctgcttcttctaaggccttaattcttctgtccatatcatcttcaaaaccatatactctatcgaaaccatcttgagcagcagtttcaatcgctttctgttcttcttccaactctttttctttctgttctaatgcttcttccttttgtaacaacttcttttcgtcttcaactatttgatttaaggttttttcaatagcttcctccttcttgaacaatatttcttcatttttaagcaattgttcttcgtttttaagcaattgctcttcttctttttctatttttatctccttctctaacagtttctttgaatcctcaatgatttgctgttcatttgaaaagagttgctgttcattgccgaataattcttttctttgagcttccatttttgagttcattagaagcatagccttctcaaccgcactatttatttgtgattgttgactttgttgcagttttgcaaacagttcatcaaggtctttaatgtttgacattttactgtaatataagttttttttttttttgttcttttatgttttttttgtgtttttgttaataatataatagtttggataaggtttttttttttttttttttatttggacgataagtttaatttggatttgttcttgaatttaatatttcaaattacttataaaaaatattttttataatttccggaataccttgattttcgacaagacgtaattctgtataattatagttttaatatttacttgtcgtaacaaggtagtgattaatttgtaataataattcttgataattaataagtataaaataagtataaaataatgtgtaaataatagtaataataataataaatgtaataataaaataatggttgcttaatgtgcatataggataaacaattactttagcgacgcgtctaatgggatcttaatcagaataccataaatgaaaaatacccgaaagtccgggaccgttacgtaacaataccttacgtaatacaaagcctgtgaaaatggtttttcggagttgcgggcaatgaaaaatttaggatattaaaaacattaccccagattttaagtattttattaaataattactatatatgtgatgtaatcatccgcatatccgggggtgtctatattgaatcatctacctatacgctacccattgaacctattaatattcatattccactcatcttctttactattgccccccggttatccgtttttcacttcattactattattaattattaattactttttttttttataaaaggtaactatttcctcttattttacttccattatttgtatcattcccattattttttcttctttttatcatcatcaaaagtcaaaacaaaaaaaacaaactatcaaacttacaatgacttacactcaaattaatttagatgaagaagaaaaagctttccaagctgaagttgaagctgttaaaaaatggtggaatgaaccaagatgggaaggtattacaagaccttatactgctgaagaaattgttatgagaagatcaactttacaaaatccaaatgcttctgatgcaatggctaggaaagcttatgatttattaaaggaacatgctaaaaatggtacttcttcaattactttcggtgcacttgatccaattcatgttgctcaaatggctaaatatttagatactgtttatgtttcaggttggcaatgttcttcaactgcttcaacttcaaatgaaccttctccagatttagctgattatccaatggatacctgttccaaataaagttcaacatttattttatgctcaattatttcataataggaaacaaagacatgaaagaatgtcattatctaaggaggaaagatcaaaattaaattatattgattttatgagaccaattattgctgatggtgatactggtcatggtggtacaactgctatctttaaattaactaaaatgtttattgaaaatggtgctgctggtattcatattgaagatcaagctgctggtactaaaaaatgtggtcatatgggtggtaaagttttagttccaattcaagaacatattaatagattaatttgtattagatcttcagctgatgttttcggttcttctcttttatgtgttgctagaactgattctgaagctgcaactttaattacttcaactattgataatagagatcattattttattcaaggtacaactaataaagatattgaacctttagttgatgtaatgaataaagctgaattaaatggtttatatggttctgaattagaaaaaattgaagcaaaatggattaaagatgcaaatgtaattcaattttatgaagctgttgaaattgcaattaataatgattctaaaattattgataaagaatctgcaattaaaaaatttaattcaattgttacaccattatcatgtcattcaattaatgaagctcaaaaaattgcaaaagaaattttaggttatgaattatattttaattgggataaaccaagagttagagaaggttattatagatataatggtggtactaaatgtgctgttaatagagcaagagcttttgcaccttattgtgatatggtttggatggaaactaaattaccaatttatgaacaagcaaaagaatttgctgaaggtgttaaagaaatttatccaaataaatggttatcatataatttatcaccatcatttaattggaattctgcaatgactccagaggaacaagaaacttatattccaagattatctaaattaggttatgtttggcaatttattactttagctggtttacatacaactgctttagctgttgataattttgcaagagattttgctcaaattggtatgagagcttatggtcaaaatgttcaagcaaaggaaattgaaactggtgttgaagttgttaaacatcaaaaatggtcaggtgctgaatatgttgattcaattgttaaattagttacaggtggtgtatcttcaactgctgcaatgggtgcaggtgttactgaatcacaatttaaataaaatttgtcgattatattattatattatagtaataataattattgattagttattattattattaatgaaaaaaaaaaattgttaatgatatttccccttcttctttatttcctatattcttatttatataaattatatcttattattatgtattcaattcaaaacaaaaattaaagtaaagaaaaataattataatgatcgaatcatgaatgcacatacaaaaaaaattattgatgaaactaatttttcacttattttcatatagtagtttcttttagcaaaatcctgtatatagaacaataatgttaagaataacatcacaatataataaatcatacataactcaactaatagctatacgtagtattagaactagagttgcaatacccataaaaccaatagaaaaatcacctataaaaaaaccatcatcatcatcagcatcatcaataaatgaagaacttgtacatatacctactaaatcaccaacaaatccaagattaagatcaagtagatttgcatcatcaacacagaaacgacaatctaataatattgcagataatttaatacaaaatatgaaatttaaagatgcacaaacaatttcacaagaattaagggaacaatttattaaagatggaattgatattgatgataaatttattgaagaaatgattaaagaatctgagaaagaacaaaatattgtaatgaattatttagaaaatcctaaaaatacagtaaataaattaaaggatgaagaatttcaaatgtatgttgaatggttaattaatgatggatttgatagaattaatttacaacaacaagatttatttaaaaaggaaattgaattacgtgaaaaattaaatgaatttgttaaagataataataataaggaagatcctgattcattaacaaatgcatttataatgacacaggaaatgtctaaaattcaatcaaaatctgcattagataatttaccaatttttttaaaacatttatcaacattaaataataaagaattacaagataaaatatcattagatcaatattctaaattatatgaaatttcaactcaattattagaatcaaataatagagatttatgtatttatctttgtggtaaattattatattcttcattaattaaaaattttggtaatagagcaagacctgatccaattaatgaaaaatttttcattgaaagttgtattaaatataatgattttgatagagcaattaatttatattctacaagagttgaaaaagatgtaaaagatgaaagattttggtatgaacttggagttacaatttatttaaataaatatacttttaatacaattgataataataataacaataataataatactaaagagataaataatgaagatttaaatattgcaattgaattaattcaaaaaattattgaaagatgggggtatattaataatattcaattaattgaaggattaaaggcatgttgttcaagatctaattttaatgatgcatggtggttttgggaagaaattgaaattaatatgaatgaaattggtgtaattaaagaaattaatatacctaaaagtaaattatatgatgaaagtgaacgtaatgaagttttcaattattataatagagttgataaagttagctttaatggtataattgaatgtattttcgcatttatgagtagattaaaatttgataaggcaatagaaattatgaataaagcattaaattatgatattgataatgaatttatttatcaatttgttaaaaaatttacaaatcaatttaattattcaggcagagaattatttttattttatttagaaaaatatttgaaggataataataataatgatgagaataagaaaatttatcaatatttatataatgaaattggattattacagaaaaatagatgttcatcaattgaggaggcacaattattagaagatattaatatttatcttgaacgtgtatcaaatctgaaaaatattgatcccaaaaaaattttcaaagttaatgattttaaggaaattttacaaagtggtgaaaaattaacatcatttgatgttaaatcattaattaaaataattttagagaataaatcaaatacatcatttcaacttgcaagtaaaataatttatcaaatgaataataataaaattaataatattaatgatagtattttcccaattgcaaattcttatgtttatactgaattatgtaataaattattatcacaatcaaaaccaagggttaaagaaataaataattttttgaaattaatggaacaatatgatattaaattagatccaaatttagttagcaaaattattaaatcatatgtttctaaaaaactttattctgaatcaataaagtttattaatgattatgttttctcaaataaccgtattgcaattcaaataaatgataatagtaatcaagaggagattatcaaggaggataagaaattatatactgatgttttcactgctttctacaaatcagttaaagcaggttcattaacaaaggaaatttatcatgaaagactcaaatcattacaatttttcactgaaaaattattgaaaaatgatttatatattgatgaaaatacattacaagaggcaatgacaacatttttagcatatggagattatcaatcagttatttgcctaatacaattttatggtaataaattaggaaatgaaggtaaattaaaatttaagttagttttagcattaaagacaaaattagagataacagttgctaaaactgctaaatatattactaaaaatgatgatacaaatattaataatgaaatttcattaaatagaattgcacaatatcgtcgtaaatttggtacattatcattaagtgaagatattaaaactcaaagagattacccatggcaagaggttgctaccgtggtttatcgatttgctgaattatttggatacaaggctacatacaccaaagaggatccattctcattgaatctatctgactatgaacgtcaagagaagcagaagatgtttgatactaagctgttggaactgcaacacttgtacggactggatcaatggcatccatagagagaaattccgaaatttccgaaatttccgaaattttttttttgctgcatgaaaaatttttcatttgaaatttattgtattgtattgtattaactatcttgggttttatcggtttgatctttgtattgtataaatacttatcttctttcgtttatatatcttcccttatatcttcctttgtagagtgataaaaacttaatagagtacatttcacacacacaatgcctcctaagtttgacctaaatgcatccaatttccaaccttccgataattggactgatcaaccaactggttatcaaggttatcaaggtgcaggaagttttggttataataccaatggttccagtaacaaatataattctaatcaacaaaagagacaacctcaacaaatgtcatttgaagattttatggcaaatcaacaaggtaaattaaataatagacaacaaactcaaagtccaattaattcccaaaataattcacgtgcaaattctaataataaaattccttcatcaacttcaattccatcaatttcttcaaatacttcaatttcttcaatgacttcagcattagaaaaattagatattactcccttatcagatattttatcaaatttaaataaatcaactaaaatttcagaagttcgtgaacattgtaatgaaataactgataaaattttcaatcaaggtgcaaaatcaattattgattggaatcttattgatattattaaaactttaagtagaccaaagaattctccattattaagagaaggtgcaacaattttaattcaaactttaagtagaaaatttgctggtgttaccccatttgaagcttatttcgttgatttctttaatttagcattcgaattatttactgataaagaaaatactgttaaaagatctgctcaaacttctgttgattcattatatggtatgttcccaactgaggcaaaggcatcaactttagtaagtcatttcttaacttatttaaaatcaagtgcaaaatggcaatctaaaattgcatgtttaaaattagttgaaaaattaattgaagaatgcccagctgatttattagaattagaattttatgatgcaattccaattttaactgatatggcaactgattttaaacctgaattagctaaggaaggtatgaaaattttaaaacaatttgttaaagttctcgataatttagatttatcaccaagatatgatttaattgttgaaactttagctaatcctcaaaaagttccagattgtattaaaactttagcctctgttactttcgttgcagaagttactgaacctgcactttcattagttgttccaattattgataaatctttgaaaatgtcatcatcatctcaagagcaattaagacaaactgttaaaattactgaaaatttaactagattaggttaataataaacgtgaaattgaaaaatatattcctgttttattaccaagtcttaaacaagttattaataccgcttcattaccagaagttagagatatggcaaatgatgcattatcagttattgttgaagctgaaaaggaacaaagtgatggtaaattccatggtagattaaataaaactacatctgttaaatatattgaacaatttaaatcaaagattaatgatgatacattatttaattatttaaatggtattgttgtctctgatgctaatgttaatgattggaatgcattaactgaatatttctcaatggcattatcatcattctatgataatcaagaacaaaaggaaaaagatgttgaagcatttgttttaactttgaaaactttattcactccatgatgctgttaatgatgatgattctgaaggtattgttattgtcaatgcaccattttcacttgcttatggtgctagaatgttattaaataaaactaatttaagattaggttaaaggtcatagatatggtctttgtggtagaaatggtgttggtaaatctactttaatgagagctattaataatggtcaattagaaggtttccagatcaatctgttttgaaaacttgttttgttgaacataaattacaaggtgaagaaggtgacttaaacttagttgattttattgcagctgatccagatttaagttcaacaactaaggatgaaatttctacagcattagaaaatgttggttttaatgaagaaagaagagcacaaaaagttggttcactttcaggtggttggaaaatgaaattagaattagctcgtgcaatgttattaaaggctgatattttattattagatgaacctactaatcatttagatgtttcaaatgttaaatggttagaagattatttagttgaacatactgatattacttcattaattgtctcccatgattctggtttcttagatactgtctgtacagatattattcattatgaaaataagaaattagtttattataagggtaatttatcagattttgtttcaattaaaccagaagcgaaagcttattatactttaacagattctaatgttaagatgcatttcccaccaccagggtattttaactggtgttaaatctaatactagatctgttgctagaatgactaatgttacatttgcatatccaggttctgaaaaaccttcattaaagaatgtttcttgtaatatctcactttcttcaagagttgcagttttaggtccaaatggtgctggtaaatcaactttaattaaattacttactgctgaattagttcctcaagaaggtactgttgaaaaacatcctaatttacgtattggttatattgctcaacatgcattacaacatgttaatgaacataaggaaaaaactccaaatcaatatttacaatggagatatagattcggtgatgatagagaagttttattaaaggaatcacgtaaaattggttctgatgaagaaagaaaaatgatggaagttcaaattgatgtcgatgatggacgtggaccaagatttattgaagcagttgttggtagacaaaagttaaagaaatctttccaatatgaaattaaatggaaaaattggttaccaaaatgtaattcttgggttccaaaggaagtccttattgaacacggttttggttcattagttcaaaaattcgatgatcatgaagcttcacgtgaaggtttaggttatagagaattaactccaaaggttattagacaacattttgaagatattggtcttgatggtgaaattgctgatcatactgctttaggttccctttctggtggtcaattagttaaagttgttattgcaggtgctatgtggaataatcctcacgttttagtcttagatgaacctactaattatttagatagagattctttaggtgctttagcaatggctattagagaatggaagggtgcagttgttatgatttcccataataatgaattcgttggtgcattatgtccagaacaatggattgttgaaaatggtgaattagttaccaagggtgtcgctgaaattgatcaatcaagattcgaagatggtggtaatgaagaacaaactaaagttgcaactgaattagcaaagaaagcagctgcaaaggctgatgatgatgattcacctgctaacattaaggttaaaaagagaaagaagaagatgactagaaatgaaaagaaattacaagaagaaagaagaagacttagatatattgaatggttaaactctccaaagggtactccaaaaccagctaatactgatgatgaagaagaagattaattgtattaatttttccttcaaatcttagatatatccatttccactttattattattctgaacattctctttatgaacttgattactttattccgcttgaatttttttttacaacttatatttttacttctgtgtttttctaataaatctaatcattacttttattcaattctataaaaatattgtatagttatcaaattaattataaacttttagaaactctctaaacgtatagtgcaacaataatagtaacttatgattgtatcgaaaacctaagttacaaaccaaccaacttaaaaagtaaagtattttcggactgaaaacagtccatataaacaagtgaaatctaagatgataacaagcatcctaataagagtaacccactagtacaatagaaaacaaaattgaaaagtaatttatcaaataagattttccatttcattgattgaattctatcttgaggaatcttactgaatgtaaggtataaatgtgcaattgaccaaaagattggaccggcccaattgcaagtgtaagttaaaagacctgataaaaatatattatagttagttaaaccattgaatgaatttgttagatcaacagatgataaagaattagttgaaccaaattgaaagaatgttaaattttgtaaaagtaaaatgaaaacattgaatatatttgaattagttgagtaatttggtgaggtatatgcaaatccaaataaaattaggtataatagtgggaaaattgggacattcaagtagttcgtttgtgaaattagtacaaatgtgataattcccaaaacgtttgagaaataatgagtgattgatgttttctttttaaatatgaattttgataccataggttcaaacaattgaataataattgtgaagagccaaactctttgtaataatgaaaataaaacattatttattttattaaaatcttcaagttgtgtggtatctttcaaaaaagaaataaatttaatgacaccatttaggaaatactaaggagacgtcattgatattataattttcagataaataagctaacatcttagaactaccaactaaacatgttaacattgcaataagaacttgataaatattcattgacaaccccgcttcagtttttacattgatatgaagtaccattggtaaaaatgataagactaataaacccgcataaacatttggaccaatatcggaaggtaattgacttaaatatgtagataatttcatattagcttttaaattgtgtttttgaccactattattccactgctttaagtaaacgtaaaccaatcatcattgaaaaaattgcaatccaactaattgatccaattctaaatcttttgaaaataatataagcaaaaaaaatagtagtaaagaaccaccataaatgatgttcttcttcaaccatagatgatgcaataaaattgactgaatatgtaacaaagaaaacaacatcaaagaatgcagtgaaaaattgacctttaaaataaagaccaaatataataaaagataagattgtcattaataaataaactgctaaagctagatgaagatctgaataattgtaatcatgaggatgaacttaataattcttcctttgcagagttgatatattcaagtaagctgatcaatttccatattctcaaaagttgaaattttaccgtttgatttgtccaatagaacctttaattgtaaagcagtttttaatcaaaacatttttctgttcttcttcatcattgtaaagatttaagaattttggtacaaaggaacctaaattgttaatagggatatttaaaccaattaattcagttaaagttggaactaaatcaatttgatcaattttatcaaaataattataatcatgattccaagtaattggactttcaatgttattagtttaaatttaagtttttaaatttttgagaaactaacattaaagcagctgaagtttcagcagttgatgaaccaccatgattacctacatcattcataccatgatcacctaatataataaataaagaatttggattttgtagaacaacttcattaaagattctttccataatttgatccatctccttttgctttaaaggcatatttggactatttggaccacctttatgaccaatatgatctaaacctaaataatgtaagattaaacaatcccaatttgatttcccctcattacttaattcataatccaaatgtcttgtaacattattatcaacaattgtaaaatcactaacatagaaactagcagtaccttcagttttagtaaaataatcggggaaaagtttatgccaagtatcatcaccgaacatatttattttccaatcatttaagaacatttgctttaaccaagaatcttgatcagcctaaaccacttgtattttcatcatcagcaatattcaaaactgcatcaataaaatttggcgttgaaccagttgttatacctttaagtcttggtaatgtaacagttggagggtttgagaaagctgtgaaacctacaccataaccatcatttaataatttatgagcaaagtccatataagagttatttgagaacaggaaatctgctctcattgcatcaacctaccataagtaacaactcgatcgaattgaggtttaggttcaatataatcatctggaaatggtgtactatattgatataactcatctggtgttaaaagaacttttgtagggaagaaacctttacaaaaaagtaagaaggcagccagttgggctagaagactgaatatcagcaccaagtatctcatcgagttcaattataagtcctgtagaaagtaaaatcaaacaccttttcattcaaggttggcgtcagttcatcaattccatttgttttgtttacatgtaattcactaaaatcatctaaattattacgtaatatgaaaaaaaatcaaaatcaaaaatcaaacattacacagtcgcgactgatggaggcttaacattttaaatgaaaaataacccggcgatttcggaattaaataaattttgaaattgccaatgatttctataaaggaaaggatgttacgattaaatatacttagtgatatttgataattaatgattaagtttacatctctagatctaatatatcttatctatttcttctataaacaatcataatgcaaagctataagagtatcacaagattagtcattcaaaatactagggccaatatcagactttattctagtgggaatccattttcatccaaaggtccttcaccacctgaattagatccggaagaacaaaaagaatttgaaaaattacaacaagctgcaaacacatcaaattgcaattgaacaatataatgaagatcatggttttaaaactgaagctgctccacctaaagtttcaacttctgatgttggtaattttggtaaatcaatgcaaacaattcctgaatttgatggtaatgtcaatccaaaaacaggtgaagttaatggtccaaagcaagatccagttagacatggtgactggagttttaatggacgagtaactgatttctaattcttagttatcaattttccgcataattctcttataatttgattattaaaaaaatttataaattcttctatatatactactgttattataacaataaaataataaaatcattgctaataaattaaattaaacaaaaatgaatatataaaagagttgaaaaaattaatcagtattgagtgtacttaacttctctgttaaggtatcaacaaatgtagattgtgcttctaaatgtttcttaaataagtttaatgatcttacattatcatagttattcaaaatttcactcttattatcaattaaaagtccaatctcagcagctttaacatcatctaacatcttctttatactttctaactctgtctctttctttaaaacataatccttcatacgtgataattctttgaaatatgcgtgttcttgatatgaaatactaatacttttcatattattatgtgcttcaattgtttccatatctgacataagtttagccattttaccggtgagtttttcttgtctttttgatgcatcaataaatgctgcctttaatttgagaaaattgtttaataatgattcctttttaataataacggaattataaacagtaatttgatgtcgatattctaaaatcatcattgataatctctttgaaatttcagaaacaatcttaagtaacagtagttgtccagaacttacataatcagttaataaatgaacagattttaaatcttcagctgttgtatcattctcatctaaaattctattaggatattcatttagttcagaaacaaattgggaaatttttgataaatataatttaatttgtggtaatgtttctttttgataactagttgtgagatgtgacttataagttgcaacttccttttcttcattactagtagaatctaattcagtcattggatcatcttcctcattggatgcacttattaaaaataagtgacaaaatatcctcactttctgccttcttaaccattgcataaacttctcttgtattccatgctgtgtaaatacagttttcattatatcttaatgagtaaccattggaatttgcattttcttgttttggtaaatcggttttacctaaaattataacttcatgttggtaaatgttccgcttgacataaatcattgaattcacttaattcaccaatttctaaacctttggccagactatccatccattgagaaaatcaacttgtaaaatagttccatttgataaggttaccaataatgaatcacttgtaacaggatgaaccattgcactgcagatacgacctttcttagtatcgaaaactatattatcaagtaataaaaatgtttcaccactttcaatattttgattttcaaaaaccatcttagaatttgttgatctactaaataccacaatcatattgttataaataactaataaaatatcattaggtagtgaaataagtttaatagcatcaaatgaatataaatcttcagggaatgattccattggtaatggccctgaaattttacctttccaatttgcttctggaagtgtcttttttatatcaattttgttaggagttgatgattttgccaataatgctgatactttaacagatggtataagctgtgcttgttccttttcatctttaattgatttaaaaattaatgatgttgaatcaaataaatcatttaaccataattgtgaaactgataatgtatttgggaaaaatggataaattttgtaaatagatgaatctgatgttaataaaaacaaggttaatgcattttgtggactattagacgtttccccatatgattcgttagttatagatgatccaaaacatattgatacaggatcaatgactgaggaatcaatatcaaattttgcctgtgatagattattttcatattcttcattaaaattataacgttgaagaggaattttgtatgattgatatgtgtcataagttttaatttctttagtggttaagacgacaatttcagattgaaattcactgacattattaaaaataacttgtctaacttcttcatcctctgatagttgtagatcaatcttatatgtagttgtataattaattaatgaaccttctttatttaatgaaatcaaccaacaatttttatagtcatataaacataacaattgttcacattgattcattaaaatttctaaaggttcaaatgtgagtttaggagacagttcatttgatttatgggcagcgtgtggtgataatttagttaatttaatcttgccatcagaaactgtaatgatttctgaaccatttgctcttgtaattgtacagtacttactttttgttaaaaattgctttgatttttcaacaatacggtcttttaaagtattactcattgctgtttagagaagagaaacaagttcctttcttgtgttaatcgttattgtcaactataaaacaacataaattaaaagaccaaaaattggcaaatttcagaattcaaaaaattagaaaattcaaatttaatgagggtctctgagagacaagagatcagttatttcatgcatgttttataagttaacaacttctttctatacgatatattcatcaatattcataattattacatagtttctaaaatatatatcaatacaatgacttaagttagttattttcatctttttatgtaacttttgttattaatatctaatactcttgaatggaaatcttctattaaaagcacaggtatattccaacgatttgccatatgttccttatgagcagaaccaactttccaaactgttggagtattgttgacaccgataaccaacaattcgcatttctgtgttaatgtttggttgaattcaacccatttagatagtttattttgtaaaattctctcgatttgtgatagatcagttccttgaaaacccgtaatacaaacttgaagttttttatctttcttgtcatttatttcttccttatcttcatccttcccaccatcgttatcatttccgtcatcttcaatttgcaaaatactttgtttgaattgttcaatttccagactttcaggaattgtgaaatgtttacaccaaaaataatcaccactatcaactttttcattgaagatgaaacgttcaatagcaaactccgttattgggttaacaaaatcattgatctcaccattatatttgtagtttatgactgtaaaatttaccattaccgatgattcaataggaaacatctctcctccaaactttttgattattttgtttagtttcctatcttcatcatttgaaaagccaaatgttttaaacttcaatcctcccaatattggaccttttcttttctcttctttattttgaaacttattcaagattggtttactggcctcttgtttttccttgtgaataaatgaatcccataatccattacccaaattttttcttttcactttgacaatcttgtcttcttatcatcagactcgtcatttttagaaaggagatcaatttttctttttaagttaatgtcgatttctgaggattcatttaaaacagtataactatcatcattagatgtaaatgaattattgcttttgctgttctctcttatctccctattagatttttctctatttgtttttacattcttatttctaatatattcttctagtttacgaacatgttcaccagctttccattcgttcaacttatcccaatcacaagcacgatctcttttacccaaattataagttttaaccaatgattcactaccaactttatcattttcatccctgaaactatatttcttttcgagcccagtaacatttgttaacaatttataaaaagtgaaatttaatggtaaacctctctctattgaatcataacaccaatccggactaacaactggtataccccatttaatagcagcatcaaatcgttttccttcagccatcatactaatcatcaaatctgattcattcgttaaatgatcaacagctttaccaccatttgtttcaataactttcttaattttatccaacaaagattcttcaattctacttaatgatatggataaacttgcaaatggtttaatttgatcgaacattgcgaatgaaaaatctatttggttattttcatagaatttaaacacttcattactatcaataaccttcacatcaggtcggaaacctacaacatacatgaactttttagatttcaaccaatgtttttgtggatcattttgatttattactagtactttaacatctgatgttaaatctgaacaatattttgtgttgggacagtttccatcaattataagtttcagctgattaatatcattttcagttaaagcagttgaagtcactattaggtccatctatatttgtttctatacctttctcagataaaacagtaagtaattcatgggaatagagaagcagtaacaacatgaaactttcgatgctccgacgccaaaaaatactttcagtgggccctctattcacaaaagcccactaaaatcaaaatttttgtgggaaacgcgtaaagttgtacatcccagagagggtttcagtgaagatctctacacttcaaataatgacaatgatgataatgatgatctataaacggtttacacaatatgcaacaactatatgtgctaaaaatactacttataaaatcttttacaatatcttagaactttctccttcatattgctgattgtatatccatcaactaattcaatacctctttgatcaacaattcctttataatgaatttcataaattttcttacaaataaaatagctgtacattttgatacctctatgatgttcttcatcaatgcaacgtttgatgatcctttcaatcataaagatatcttcaccgtcaatgttttctatttcatgttccattttttcataaatacatttaagtatgacttcctgtaagctataatttaattttttcattttatcaattgagataagtttcttcaattcagtcgttttgattatttcataaacagatgtgataatatcgtgtttctctatttcctcagcacattctaaaatattgtgtgaaaccgaaagaagattatttatgtccaaaactatgttaatgtatttgataactgctaaagattcaataataaaaatctttttttcaagcaattccatcataacgtcgtaaacatttctactttcatatctccataaattgtagagaagtacggaaaaatcgttagtgctatcaaacttaatatcattcaaatcaataacaacagattgtttgatttcctcatttctactttcaacatcaaataataaatcattaataataatacctaaaaatccatcgattgcagggtattcatgcactggcatattatttaagttttgagcatcctcttgttttacgtcttcaataattaagttttcagtattttcatcttttaaattttcagcactgacttcaggagtttcctcaactcttgattcttctacttttgattcatcattaattgaatcattaaccttcttccactttagcttcatcaacaatcaaatcttctactttctcttgcttatgatcactaaattcgtgaatagacagagtatccatatccggagttgagtcactattaattttgagttgatcgttcctgtcttcaacaaaatcagttgctgcatcattcataattgcattgtttacttccatttcagagtctttagaactgtcattcaacattaaacttccattcaaactgacggattcattgtgcattaaaatatcagaaccttcttcaataatatcttcagtttctttgtcattttgcttgcttatatttataataggaggttcattttctttgttttcttcatgaataacaacttctccctcatctacatcttcctcaattccaatactcatctccccaaattgccttttatcttctaaattgttgaaatcaaacatgctatcgttttgctgtttttgttcaatttgttcaatttgttcattttccttattatcatcagttttatcaacaacagatctattagcaatgattgaatcgttagtaccatccatgcctgtcataactgtatcttcttgttctctattttcaacaggtaaatcaatggagagtcccaatatttcagaaattcttctcttatttgaatcatcatttaattcaagtaatgaattcataaaagtatctttaaattcagtcaaacagaacttgaatatttcgatatattctttttttaactcatcgtcaatatcctccctgtttttgttattgttattatcaattatttggaaactggtaaataaggaatcaaaaatacttgtaagtaagtatgattttattaatcctcttttaataataattaaattcttaaaaattttcaaaatcgaatcaataattgagtttctatttcttttgaattgaattgatagtataacattattggtagttgttgaactaattgccaaacttattatattaaccagtgataaacataaatcttcgagtgataattcattgacaatgaattcaatcctttgataatccctacttgttgttaagtataagcaaaaaactctaacaatattttcagttgaaacgtaattagagacttttttaaagaagttttcgtttcctggtaaaaatataatgttgaaaacttctgagtttataatacttaactgattcaatgcactatgaaacttgacagcaattgtactttcattacttttcaatattttattaaatccatctctttgttgttcctttgaactagaagttatttcttcgtatattatattatctctcttcaaccttccggtaaaatcatcaaaatcatcttccttgttttcgttactcatattttcattctcgatttccggttcattgctattaatagataatgcagatgtttcttgtctagctgaattattgttgatattatcagcagtaaagcttcttaccgataatttcggttttttatctgtggttcttttaatttctaatgattcacttctagtatttttccttgatgattcatgaacatttttaaatgcaaggtcatgatcattctcattattttcgtatctatttgatattctattatttttaattactggattacttgaatcgctactcagtcttgctttaatcagttgcttgatagggatacgtgttgtgtttgtattatcaaaaatacctctggctttagataacccacgaatagttaagacatcaagtttccttgtaattttcaattgatatgatgaatcaagatcgcatagagtccaaaatgtcttcctcattgcatctttaaccagtggaattggatctgataatcctctgacaattattccttcaacagattcaacaaaataatggaattgggtcatgtcattgggattataatattttagcaataataattggatccaattaccagtataaacacgaggttgtatattcttatcatgtgaagttgaagttaataatggaaagattttgttattaatatttgtgtatagcaaaagagaaataataccaacatttgaattttgatgttgaatgatttttctggaggatgttagttttaataaattgattaataagtattcaactaatgaactatcaagatatccaccgacataaattcccaattctttacatagttgacatgtgttgttacacaacgtagttcttaatgacatcatacccttgactatgcattctttgacatttttgagtaatataacaaagttatcaatatcaattaataaatcctccccacgaaggatttgtcttaactttattatcaatgattgtctatatttccagttcttctctgtctctttatcatcaaaatgtaattcaaattcagaatataaagtttcatatcttaatgcagtatcatccgaaggtgaaatttcctcaatatcccaattgggtatcttagttagtatatcattaagttgttcattatgatttttctcggaggtttcagtttgtattatttgacttgaagggttaaccatttcaaggtatctattatataagttttggtcaatatcttgtaatattgtagcagctgtatttgaagaaattttataattcattaaagcatttaataaatcagttttagcggaattatttgtagggttgataactttaaaatagagggataagatttcattacatttagataatatttcattgttatcagtattcagtaatttaacaatactctctaaaattaacttaaatgaaaatgtaaaactgtttgatgattcaattatttgataaaaaatatttagcacagaaatttgcattaattgatgatcataaaaatcaacatttatcccatatttcaataaatattcaataattaaatcaatttcaccatttggtgcacattcaataaagattttcagtgatttaatagctgttaaacgtattgaatcttttgtttcgtttaatgtttgaatcaaaaagggtaacactggatcatatactgatacaagaatggatggttcttgaatactgacacgtttaattaaatggcacagtgtactaaaagacagaattgatagtgatcttacattataagcactaattaatgaagtcacataggctggaacgtatgacaaatcaactaaatttctcttaataaattgtttgaaatcagttattgcttcttgacaccaatctacatctccggaacgtattgcctgcagcattttattcccataattctggttctccatttgcgatataagattattagtctagtggttatctatatgtaaatatcagttgcagttgaagaaagaaaatgatgtttacattaattatccaagcttttccatgaaacacgaaaaatcttgaaattttaaagatcactgattaatactctattatgttacttctttattatataaataactatctaaacttcatcgtatacaggtatacaggttgcaggtgacatccattgggaaattagaagtgttcctgctccacttggttgagaaaacccaatctcttcctttttcaaagcaaccccgtatattgcatgacaacgtaaactttctaacatttccaatgctagacctttccttcgatactcttgactaacaaatatcctagatacacctaaattcagttgcattactttcaatctatccacatttgatgttttgatatccataaaaaatccatctaatggtcccggtattgtggtggttattccaacaatatacgatttatttatagtggatttggatgtatttggttgagaaatcacaagcaccactttatctaagattttattctcttctgttggtgtattaagccatcgattattaatcattttgagcattgtacctattatctttcgtgtcgttgtatcacgataagaaaccaataggatagaaagtttccgttcttcttgattaatggtaacacaatgtgaattaatcactttacctatttccttcagcttagatatcttcaacgtacttatttcatatccatttaaatattcattatgatatcttttgtgttgtgaaattttatcatttgtgttacaagtgaagaaattaaatccacattgtgaacatgttttcggtcctttttgctttactgcaaatgtcatttgcactagttttggtcgtttagcatttttaccaccatgtgtggctttcttatccatatcttatacaagatcaataagaaaagagatgaatggatattataaaaatttaataaggtgaagttgttaatttttcaccgagctctctggttagcatatcaacgttaaatactataaatttattactaactcctatatgtacttttataaaatacaaaatgaatgaaactgatatatatatgacattagactatatttcaattctgtataacctattgaaatcaaagtcttcattaacatgtccaacaaatgtattccaatagtaaactattctaatcaaacaccaattatatacaatttttgggaaaatataataagatcttgcaacccataatactgttctaaatacatgtcgaagttcaatcatgaaaatttctccaagtgtttcaggttctgaatcatcagtttcagtattagggtatatcacatcttcatacatttccttttcaactttaaataaatcaggagttttaatcttttcattgtccttctttggttttaaagcttcctttttattcgagttttgtgatccaaaaccagtattgaaatttttattattattactaccaaattcttctgaaaagtcttcaacatcttcacctctttcttctcttctaattgcttcgtcatacatgtttttaaacatcataacactttcaacactctttgatagtctatcaaatgtattaactaatgcaattatttccattttagataaattaatttggaaatgttctttatcttttaattcgaaaagaaccttcaaagcagttccataacctgtagtttgaagttttccccataatctacatctatcacaatgaacacaatccataattctagttatattataaaaattttctctgatttcttccttaacaataagagaatcatcttccttaaataaaacatcttcttcaaacatacattgatttttactatttgtaaattcaacagctgggtttaataatgttctaaaacttgatttaaattcacattctttttcaacaaaattggaatcatcagtaaaatttaaatgatcgaaaactccataagtttcaagtttaattaatgatttcagaacaacaatataattcaggtataaattagcaattctatcaggatgattaccaactctaatcataaattgttctaaacttggtttgtaatccattaattgtttattcaaatattcatttgataaatgagttgaaattgatgcatgcataccactaataattttataaaagaaatttttttcaagacattgatcatgaccaagattaaaacaattttcattataaatacttttccaaatttgccaactttgatcaccaccataacctgtaaatctttccggattggcaactaaatcaacataaactgtatcatataaaaatccatctaaatcacaataatctttatcataattagttgaattatcatcatttaaattattaactaatgttgaaccttctaatttacctaaagcttcaggttgccaaatttcaggtaaatcattccaatcatcaattgtatcaactgcacatgatctatgcatacaaaatcctccatcattccaaaatggacattctttaaataaatttaatctaaaaattctgaaaaaattctcctgtacaagatttttaataattggtctaatttcattatttaattgattaatttcattaaaagtaacaccagttgattcatcaactgtatgatttaaaaatgtttcataattatcatttaagaatggagttttaatgaattgatggaaattattaaactgaacaggtgcaggtggttttttctcatatttaacaataatatcatcttctagaacgttaaaagttgcagaacaagcaaccataaacgtgatcagtaccagtaaccaacttttcatccttatcgatatcataattgaggtgtatatggtacaaatctacaaagaaccatcgattacaaatacatagaaaaccttaaaagaaaacacgtattacgccactggaaaaaaaataattttgtgggagggcggcccatcgtttttttcatgacgtgtcgatatcacattgatccgagataagcattgattaatggtatgtttattatacaggaagtgtagatagatattaactcaggttaacataacattggtcttccaatcacgtaaaacatcaacccagctgttgtttttaacattatgatttttcctacgccaaatttcaagcattatttgtcttgcattccaatatgtaccaatacctgtttgagcaatattttgaccccatttattaaatccattctgtaaatataaggtcattgcttcactacctgcaataaatccttgccaaaataatggaataatatatgaagtttccttgttattttctaaaatttcttgaattttatttaaatgaaataaaactttttcaattctctctaaaaggtacattggattaacatcttcaataaatctgtaaaaataaataattaatgcatgataaaatgacataacatgatgataaataccttcatgtcttggtgaaataaaattttgactactattatcattaattgaatcattaattgatgatgcattatcttcatcatgaattaatgtccattctaatttccatgttaataatttaaattctaattgttcagctaattcatcgaaaaataatggtaattcaatattatgatcttcatgatattttttaaatcttgttaatggtacaatttctccaaacattaaaattaatgaatttggtaatccataaattgcatcagatgaaacaactttatcatctaatttattctttgatggttggaaacttgttcttgttatatcaacaaatgcaggaatttcagcatctgcattaactatattttcctttcttgaatttccattgttaaattttaatccattaatatcttcatcatcattattaacaataaattcaatacgaactttaccattatctgtaattttttcattatatttaccacgtttactattatttgtaccacttcttgaattataaaattgtgaacttggtgataatgaattggtattttcatattcatttatattggaatttgctcttgaattagaattatcatcgttattcttattattattattaactatattactactattttgtagataattataagaaattggtggtacacttgaacttttagaattttttaaaatatttttatttctattatttttattcctattagatcttgaaccacctctgaaaattcctttaaaattatcattatttaaaacttcaagttgatcaaatgttggcttcgaacctgttaaaaaatttttataatttttttcattaaggaaaatttcagatttttgaatattttctaaacttgttgaatcttgaattaattttaatgaactgaaaattctatgtaaaataattgcctttgaagataatttctttttatgtaacattttcttttcaataattttttcacaatgatctaaatgaattttacatgatgacattgtaccccaaacaacatcaattgtaaccattgataaaactgctgttaaaacatctttatatttttgttttaaaatatcttcttccatacatctttcaacaaattcatttgcttgtctacgtaattgaatacctaaatcaacataatatttcatttcatcactacctctaacaaatttactttgtaaattaaatgcactaactgctaataaagcatttaataaaccatttctagcatttgaagttttaccaattgaagctaattcaccaactgccataacagctcttgggaaataaataaatttccaaggatttttagctaatggtataactgtcatcatatctgcaacatcttcaatataataattaagtaaatatctagccattggatgaacattaagtgaagttgttggtataccaaatttatcaattgctaaagattttggtaatggtaaatttgttaaaatttccattatattttttggcattttaatactatttgatgcatgaatattaattttacttacagttattggtttatcaatttttttaaatttattattttgattagttgtagaaattatattattttgtctatcatcatctgctgatggttcaattgttgatggtgttaaacttgaatcttcaactggtgcaatttcatcaggtgaaatatgtgatggattatatgctggtcttgttgttaatgacatacttgaaattgatgtattaaaagattctgaatgtgaatgtgaatgagaatgtaaatgttgctgtgtttgtgtgttggtaatagtattatcacttttgaataatttgagtctttgaatgatcgatttctgtgtttgaattattattattattattattattattattattattatgtacaatattttgaccttcattatccattgaatttctaccttggaaaagtaaatgtaacatttgatcaggaactgaatcaggtacaatttctaatttatccgattcattattagtattaataggagtatttgttttcaaaactgtattaaagttagaatttggtttaacattattattgatttctgattcagatgatgatattttcatattttgattattttgattattattattattattattattcaaatatccaagattttgttgttgattatttattattggtggtatattattattattattattgttgtttatattagaatttgtattaatattattatcttgattatttgaattatctaaatcaaacatatcaaagaaatgagtatcaccattaagtgcagaagctgtaagtaaagcagcatctaataattcagtacttaaccattcattacctactaaagcggattttgaattaatatcagaatttgaaattgggtataatggatgtgtattgttattgtttgttgtaatattattgatattagtatatgaatttgagtttatatttgattgagggaaggaatttgaatttgaatttgaatttgaatttgaatttgaatttggtatgttttgaggataagcaaagttttgatttttcgatattgatttaaacatgtttgaaactgatttactctgtgttgaaagtgatgttgaagataaagataatttccttcttttattattattattattattattactattattatcatttattatatcatttgataatttcgatttaagatttttattattatctctctttaatttctttgtattattctttttattaccctttttaattgattttttaattttcaattttgaacctcttaaaacaccgaaatgaccatttataacagttggttcattaattgattctaaatacatattatgtaatttagctaaatctgaatccatttcatcataataatgataagcatttttatcaggataaataacataatcaattgctcttctttgacaatattcagtttcttgatttggttttgaaggtaattgataaccataaatatcgaattcaattggttgtgaccaacgtaatttaacatcataaccttcacaaacaaaacctgattttttacatttttgacaacctggtctacctaaatcacaggcaattttccttcttctacaagtataacaacctgaaaatgattttgatctctttaatttgatacttttaatatcttctttgtctttatcattatctttcttatcatttgacattattgatatatgaaaaatgtgtcaagataagagataatatacccttaaaagacaaaatactattaaaatcgccacaagttgcctcttgtgaatgaaaattttcaaaattttcattttaactgggaattcgctgcaatatgccattttcggatatctaattatctaattatttataaaagctattaaatctttatctacaccttctctgcttcatctgcttcatctgcttcaccattactttgaccatttctccacgtaatataaacataaatattaaatattaacccaattataactcctaaaccactaaatccaatacctgtatataatgcatttctaatcccttgtaattgatttgctccatgtttaactgtataatattcaactgtacctgcaacacctaaaccaattgcaattgaataattaacaactgttgcaattaatgaacctgcaactccttgatgttctcttggtaatgattgtgataataatattgtaccagctgggaaacttgtatccattgcaaatggggtaattattaaacttaaaaatctttgaatccaataaatttgtgtaacaggtttaagagcatttaaaattaatccaattaaaaagcaaatcattgaaaataatataattaatgatgttggaattttatgaattaataaaccaacagatattgaagctaatgatcctgcaatcattgcaggtgcaaattgaattgcaattacaatacatgattgatttaatatatctaatgaaaatctaatcatataaaataaccaaataccaaaacttgcccaacctgctgaaattgtaattaatgtcattataatttttaaatttaatcttggaattaaaggatattgaacataattttgtgaaataataaatgcaattaataataaaatactaattattaataaaacataaacataaggtttatcccaaccaacagttggaccttgattaaatgcaaaattaaataaaattaatcctccgacacctaaaattgaaccaattggatcaaacattgaaattgttaattttggataaattgttctaatatttttaggtataataaaataagctaaaattaaaatacatagtgaaacaataccttgaatataaaacatccaattccaaattgatttcaatgcaaatattgaatcccataatgcaccaatgaaaaatccaccaggagcaacagcaccaaacattgcaaatgaaaatattttttccttaccatcagggaaataatgaccaattaatgctaaagaatttggagttgctaatgcaaatgataaaccttgcatacctctacaaatatcgaaaaattcaattgaatttgaatatttagagatacctgctaaaattgaccaaattgataaatttaaataagcaatcatataaatatttttataacctaataaatcacccattctaccagaaattaaaataaatgtaccaacagttaaagaaaatgaagctgacatccaagaaacttcacccatatcatttaaaatattaaaagattttgcaatataatgataaggtataatagtttgacttaatgaagcttgtgtaagtaattgagttaaaattattaaaaaaatgaataaaagtttatgtaaagttgaaatttcatcaaatgttggaatcggagttaaaaatgcttcatcatttgaattttttgatattaaatcatcattattattatcaatactatcattaatactatcatcaatgacattcattagaaactgaattgtggaaagaagatagtatactataagatatcaaattataatattccacatcccatccttgatatactattattataatgtgtcaaaaattttcagggcatttaactctattagtaaatctatacgatacattatgtaatcttttataatcttattaataagattactaaggttttattatattataatactgctatcatgatataattgaataataaactactttcacagtattacattccaacgtctgttttctgttggatcagcttggagtatgttgatattagttttcaatatcaatctcctataactttcctatttcctatttcctaattgggtaattttactccggcgtttagtgaaattattattattattattatttctatttttcatattatttttcactaggggtatattcctaaaatccacagtattaatatttcgtcaatgatatcaacggttattttatattattatcctatattattctattctatttcctttttagaggttgaatattcacttactaacactgctctaaagacttaacctcatggcttctattacaaagtctattcgttcaatcgccgttataggagctggtcccgccggtatcgcttgtgttaatgaattagttcatgttgctaaaaatggtttgtcaactcttgaattaaatgaaaaaccatctttaggaaactctgcttttgataaaattgtatgttttgaacaaaatgataatattggtggtgtttggaatttctttgaaaaacctgatccaaatttaccacctttaaattatttacaaaataatcaatttaataatcctgataaaatttatgaattcccaaaattacctaaaaattcaatactttcaaattcaacttataattccccctatatatcatattctaataaaacttttgaagatgaaattcgttggaataaaaatgctgcttataaagatttatttactaatatacctgaaaaatttatgaaattttcttatacaccttatgaaaatattagtaaaggtagatttcttgaaccattaatatcttcaaatgatgttaaaaattatttagataaaattattaataattataatttatttaattatttccgtacaagttcaagtgttgaatttattgaaaaggatgaaattaataatatttggaaattaactatacgtcaaaaatcaagattttctaaaattgaacaatggtatactgaaaattttgatgcaattattttagcaaatggtcattgtaatgttccatttataccgaaaattgataatttattagaatttgttaaaaaattcccaaatgttttaagacatagtaaatcttttagaaatgttaatgattttaaaaatggtaatattttattatgtggttcaggtacaagttcagcagatttaactcaatatttatcaccaatttctaaaagtattacaatatctcaacgttcagaaactgtttatccatggattaaagaatgttttgccaaaagtagaaatttatcatttaaaccaagaattaaaaaatttttaattgatgaaaaatatattgaaccaacagttgaatttgatgatggttcaattaaatcatttgatcatataattttatcaactggttatcattatcatttcccatttttaccaaaatctaaaaattatattaaaatttataatgaaaattataattcttcaagtccaattaataaaattggtaatttatacctttatacattttcaacaattgataattcattagcaactgttggtataccaacaattggtttaatgtttcatgcaatggaatatagtgcagctgcaattgcaggtgttttctcaggtattaaaaaattaccttcaattaatgaacaaattaaatgggataataaacgtactaaaattgataaacctgaagtacctcatagatttcaaggtttctttactgataaattagaggaacaattattaaatccattatttgaattagctccattaaatcgtaccgtaccattaattaaggataatattaaagcaactgatgttgatcaatcaaatcctgctctaattaaagcttatatggctttaatttcaggtaaagtaaattcaaaagatttaattagataatgtaaataatttagatacacttatattcttctttatagaacttgttatatataacataaataaacaatatagaatatcctaaattatttacttattcgtcccttggatttctttttagtatttaatgtcttatttttagcattttgttgttgttgtacttgttgttgttgtttacctgtaagtgatttctctgtaacatcaaacattttattagctcttgaaatttcctttgccataactgataaatcatgtatacgtccaagtttaactggatcatcccttaatgcaaatcttaaatcttcttcaataaacttatttcttttctgtaacttacgtgcagtattagctcttaatataatatccgttagataatttgtaacaacatcttctaacatatgaatcgtttcaatattgggggttgatgaatcaccaaatgcaaacaatagagattttaagtcattagtgaataatcgttgtttggttttgttatgtctcttaggtgctgccattgctgtagaaaagaagtttttgatataataaagaaaccagatcgtatatttaaaaatagcaaactgccgtgtatatgtcaaaattaaataatttttcaatttgaaatcatgttactttttatcactgctttctttttggtgttttcttacaaagttattgaataatataataactaatgaaggtcataactgcaagagaggtggaggatagaattgctaaaggtcaagccattgttatttatgataatcatgttttaagattagataaatggattaaatatcatcctggtggtgataaagcaattcatcatttaattggtagagatgcaactgatgaaatgaattcttatcattgtgatgaaactcagggaacttttaaaaaatactttattggtaaaattgatgaaccttggattaatatgttacctccaattcaaggtggtaaatatcgtttaattgatgataataatataagtagtacaaaacttgttggacaagttgatgcagatattgtacctaaaataccacaagatgttgttttattggatggtatggaacaatattatcctataattgatgttaaggaaaatggaccaattagagatccaagattattaattgataattatgataatacattagttaaggaagatttaaaggatattccatcattagattatgaaactcaacgatggttatctttaaaatataatgaattacatactaaaattatagatgaaaaattatatgattgtccatatattgaatatttttatcaattttgtcttaatttaggattattattatattcacttgtattttataaaactaaacattatttcataagtgcaatatttcttggatttttttggcaacaattagttttcattgcacatgatgcaggtcatatttcaattactcataattatcaaattgataatatacttggaattttaattgctgattggtttggtggattatcaattggttggtggaaaagaaatcataatgttcatcatttaattacaaatgatccatgttcatgatcctgatattcaacatttaccattcttttgtgttagttcaagattatttgataatatattttcaacttattatgaaagatatttatggtttgataaatttgctaaaactttattaccattacaacattatttatattatccaattttatgttttggtagatttaatttatatagattatcatgggaatatgttttaaagggacaaggtcctagacatggtaaagctgcatggtttagatattttgaattattaggactttcatttttcacatattggttcttttatttattaattggttcattaccaactaaatgggataaattccaatatattatggtatcacatataactacaatgattgttcacgttcaaattactctaagtcattttgcaatgtcaacatcagatttaggtacaagtgaaagttttgtttcaagacaattaagaacaacaatggatgtttcatgtcctgaatggtttgatttctttcatggtggtttacaatatcaagcaattcatcatttattcccaagactaccaagacataatttccgtaaggcacaaagccatataattgaattttgtaaagaaactggtttaaaatattcaatttatggatttgttacaggtaatggaattgttattgataaattacatgatatagctaatcaagttgtattattaaaggaatgtattgcagttgagagtggtatgattaaaactaaatctgcatagtcttatcttattattcattatttagattctatatagatcaaatggttgtatactatacaatataattacagtatacacttgtagaaacaaaggttttaggaatatattaaagtgttgatctgtggaaatcatggactctcgctattattccatttaactacactgaatcttcttcttggttcttatgatttatacctgtgtataggctgtatattacaatagatatagatacagatatagaatagagacattattgaaaaatgtttaaagttttcaaaacttcaggtatagaaggtaattatagtgtatcctccaatgcattatttgtcaataatggttgttggtctgtctatccagcaaaacataaaactaccaaaaaggcttattcagtatggcaatttaataaaaaagattgggaaactcaacttataaatgcaggattgattaataaatcaaataaatcaatgattatgaatgatatattagagaatattaaattgtttataggtaatcaatcaaaatttaaacatccaaattttttaacaattattgaaccattagaggatcataaaaatagagttttatttgtaactgaatatgttatgaatgatctttatagtattaataaaaaagatttggatgaaattatgataactaaaggtttattacaaatttgtaatggattaaaatttttacatgaaagtgttaatagtgttgatttaaatttaaatccatcatcaattttaataactgataattatgattggaaaattaataatttaacatttttagaaaatatttcaaatggtataataagtgataaaattattgatccattaaattcaagaatgccatcatttttatcaattgattttagatttacaagtccaaatttattattaaatcataaaattgattatattaatgatattttctcagtctgttgtttaatttattttttgtttaatgatggtaaaatattaattgattgtcctccatcatcaagtatatctgaatatgagagacaagttaataaattaaatcaattattgaaaaatgctcaaaataatcaaaatataaaacataatacatttgaaaatatacctgataatttttataatacatttcttaattcattcattgaatcacaggagagtaatactgatgttattcaattgaagaaagttatcacaattaatgatataattagttcacagattttcaataatgaattaattaaattgttgaattcacttgatgaatataacaccttttcaaattatgaaaaaattaattttttgaaaaatcttaaaattgaaattttcaaattcccaaaacctttacttattaataaatttataccaatattaattaattcaattgatataagtcaatttaagaaaaataataaaccaacatctgatgatgaagaattaattgttgaaagttgtgaaaatttacttttattatctaaaaatttatcacaattaacatttactgataaagttttcccacttattttaacaattttaaagaaaattccatttgatagttttaaaattttattattgaaaaatattgaattaattaataaatgttcaaatacatcaaattctaattcaaataatgaaattttcactaaattttcacttgatttatttgaaaaatgtattaatgaaaaaaattcaatgattgtacaagaattaacattaactaatattaaaataattttacaatgtcaacaatataatacaattacaactaatatattaccaaaattatcaacattatattcaactactacatcattgaaaattaaaacattaacagttaatacatttattataatggtttctgaattaaatacaaaaattttagatgatcattcaattgttgaaaatttattaccattaattaataatacatcatcaacagtttattctaatactaaatttacaaataatttagttaaactttacaattgtatatttgataaattatcaaaatcaacaaataaatcatttaatattaaaggtaatgaattaaatatttatgatattatattagaattaggatttacaatttggaaaattggtaaatttatacaaatcaacaagatttaaataatattttcaatacatggaatagaattgaaatttatttaaaagatacattaaattctcaagttaaaatagataattcagttgaatctatgaatagagatgaaagtagtactagtactaataatataccagttattaaatcagttcaaccaattagacctgaaagtcaacctattaaaacatataattctacatcaacaataatgcaaccaatgaaatcaattaatcaaactatttcaactccaacatactctccaaatccaattcaagtaatgaaaccaatgaataaaccaataacaacaacaacaacaacatcaacaactcaatcatcattatcatttggacaaatacaacctcaagtacagtcacaagtgaaaacaacttcaacacctgtatctaatacaattgattggtcacaagctgataaatttaaagtaatgcaacctgttaataaaactcctaataaacaatttttcagtaatgcaaccaatgaaggcaacttcaaggactgttacaccatctaataataataataataatgatgatgatgatgatgaatggtcagattttgcagttggttcaacgactactaagaatgttgcaattacctaataacgatgtttggggtgatagtttgatttaaataatgtgatatatcaatcaaccatatcattcataatctctttttatagacttttatactaatatactattatacaattacacaattctttgaatcagattgatttcgtgatttattctttgattttgtcctaatattagattttgtaatctgtttaggttgattgagttgttttccttgtttaatttcctttggtttaggatcaggttgtttcctatgattttgtttttgtaatgaacgatttaaattatgttcttcttgtaattggatttgtttagctaataacatatcagaagtttcttgttgttcctttataggatctttaattttttccaatggtttaattattgattgtctaaatgatgaattataataatcaccatcatcaagtattgataattgtgtccaaactatatctgattgagaatgcataaccaatatctgttacgagtagataaatttgatcatcatgtttaagacatgtattataatgatcatttctgaaaaataggaaaatagtttcatttggtaataattggttgttaattaatgattgataaccaatatctgtaagttctgttttattagtgcttaagaaaagattgatttcattagataatgtatcaacattattctcattatctatatgagatactagataatcttgacaatgatcgaatgttggattaatattattggttgataaattcgataatagatgatcaggcattaaaaacccatgatatacatttaaattaaatattgataaaattgattttattgtatctgtataaatattaaaatcattaaccaatatattattaaaacttggattaatcaataatccatcatttaacaatggtaatgtttcaatgagggtatcataaggtaattcattatcatcaattgacattaaacattcaattaggaaagagtatatatgatccattgatactttaccgggtgggtttgccaatgatttattcaagatatcattatggaaatgtttaattgttttattgatttcattatcatccaatgaagataaggtattactatccgatgattgtaaaagtacagcatttatcaatgcaatgacaaagcagggcccattttcattctgacgtagtcgtggtgacttggatccattggggaataccaccgtgtccactacgaggttgttcatattaagtatagatgtagatgtagatgtagaccttaagaaagaagagagtctctggtatcggcattgatcggagttgcggggttttccgtgtatgccatctttcttttataaaaggacaggtggtgtctctttttatgaataaagaggtatagtatccatcacatagcaacaattatggcattgggagatagtagaaagaagattgagttatttacacctgagtattaccgtacctgtgcaattggtgggtttattgcatgtgctccaactcattcatcagttttaccattagatttagttaaatgtagattacaggttaatgataaattatattcaagtacttattcaggtattaaaacaattattaaaacagagggtttacataaaatatttactggttttgcaccaacatttattggttatggattacagggtgcatttaaatatggtggttatgaattttttaagaaacaatattcagatttaattggtacatcaaatgtatttgtttatcttgcatcatctgcaagtgctgaatttattgcagatttatttttatgtccatttgaatcaatgaaagttaaatatcaaacaactttaccaccaaataatgtaattggtttaaccaaaaatttatattcaggtttaattcctttatggtttagacaaattccttatacaatggttaaatttacaacttatgaaaaaattgttgaaatgatttatagtaaattatcaaaaccaaaggatgaatatagtaaaattcaacaaactggtatttcatttttaggtggttatattgcaggtattttctgtgcaactgcttcacacccagctgatgttttagtttctaaaattaataatgatactaaaattggtgaatcaacaatgcaagcagtttcaagaatttataatcaaattggttttaaaggtttatggaatggtttacctgttagaattttaatgattggtacattaactggttgtcaatggttattatatgattcatttaaagtttatgttggattaccaacatctggttagtaatttattatctatatatagtttatactttatattattctgaccaattcccccattcatcccatttctttctttgtaaataaacaaagcaaattaatccaaaaattgaagttgtaatgaaaaataaatattctaatccaatatcattccaaactaatttatatcgtatagtattgttgatattattaatttcagtttctgtgagtataagtgattcatcatcttcttcttcctcttcttcctcttcatcagttgaaatcatataatccattacaccaacaattgaattttccatcatttcccatgcaatatcagaatgtccaacatcatcgaaaactcttgttgcatcaactccaacacaatctaataaacattcaacaccacctggatgattatctaataattcagaaatatcgaaaactaatccatgaattaacatccataaaccatttttattctcttcaagactatattttttaatatgagttaatgaaggtataatatgttttgataattcaattttattaattcgtcgtaaatttgaataatccattgaaagtaatttaaattcaattgaatttttatttaattttttaatataattttgttcattaattctatttaattttcgtatattcgtagataattttatctttgatttattatttttacgtttagttttagtaagtaggtctgtagttgaactgctattattactactattattattaattctcctttttatctttttcaatttaagtatttttaaaataagtaaaaatttagcaaaataagaatttttatttgtccaattataaattaaatcaggtttaaattcatcctttgaaattatccaatcacaaaaacttgataaatcttttggatattgagtaattgatttattcttaagattgtttacatcatgatgttttttactattgttatttttatcactttgattaattgcaaaatctgtatcataatcattaaattcataatctaatctaaaatcataccccaaggtatgtcttttattaatacctataggattcctaatattattctgatcctctttggtatattgtttcattgtagatgtattagaagaggtatcagataccaaattaaggaaattaatctctatcattgtcctgttgtgtatagaagaagaatttagtaatttaattaaagtgtgaaattttaattttcactcaattgagaagtgaaagtcagcaatttccaaacagtctggtgatttccattttttattaagatattgttactataggtacacaagatgatgagaagatttggtattattaagaatattagatttaattcaactattaatgttgataaatcaacaaagggtatttatgataatgtacttgaacaattacgtgaaggattaaaaatttcaattaaacaaaaattaacatttgagaaaactgcaattagaggtattatgagtgaaatgaagaatttacaaattgataatcatggaacaattattaataaatttcaaattgttgatcattttaataaattaattaaacaaagggaagaaactgcaagggaatatttatcacctaatcaacctgaaagatttaaagaattagctgaaaatgaaataaaggaaattgaaattattaagaaatatttagctttattaccagttgcaaatgatgaagatattaaggagaaattaaaggtaattattgaaaatgataaaattactgataaacgtaaattatttagtaaaattccatggaataaaattaatgaagaatggaatgcaagtagaagtacagttagtgaagttattaataaaatggagttataaagaaaagacatgtatatagaagacatttatttagcagaatttttaactaaagataagaaattttctttactaatttcatttaataattgttttttcttttgattaccaattaaaccattttcattattaatatcaaattgagtattagtttgagtcattaaaattgcattaaataatttaattacacctctttgagcagttttacgtaaatttttttcatgttgtaatatttctcttgcatttgattcatttgttggtaataaatttttaattctatttgcagttaattttttcttcttttcattaagtaaaattcttttagccttttgttctaatttatcatcatcaaatttttttaaatctttctttgaacgaactaaaattggatctttacgatcataagcctttaaatgagtatcaagtaatgcattcattgcatttgagaaattttcagattcttttttaattgaaagtttaggttttttaagtggttgtgggatgtcatcattatcggaatctgaatctgaatctgattcgttagaatctgattctgatgaagatcctgagatagatcctgagatagatcctgagatagattctgaagactctgaagcagactcgtttatttccttttctataacttcattctgactcttgtctatacttctacttctctttagagagattgatttcttaggtgatgtagtggacattgtgtacagtaagaaatgataatttttcactctgtagatttaataaaatattttaaattaaagattaaattttcatgttgtgataaaaaataatttggaaaaaaagattacgtaatgtgatgctctcggaaatttcaaaaaaataaaatgaaaatcccgcgcaatattcaaaattaaaatttcccccactaaatttccgaaacccactcctaagaccactaataaaagaaaccctaataaaaataaatactcactctccgttaacggtctactatttactattatacgcgcttaaatagtaaattaccattttaagatatgactcattttttatctatcctgagtctataaatactacccgtattttccactttttcattttactgtatattatctacgtttattctctttttcctttactttcctctatcttcttctctctttctcttatcaaagactttttaacaacaaacaaacaacctcaagctttaactccatctctacattttttacttatcttattactgtgtttattattatacttcaaataaagaattaaaaaaatgtctgcttaaagccccccccctctacgtttaaattaaattaaattaatcctattatattatatctgtttgttaaatcccccttatattattattattattaaaataatatcaaaagtcaattaaatatttcttaaaaatgttgccgtgaaatctactactattaattaatctcaaaatgattacctactactatattactactattaaaaattaaaattaaaattaaaatttacatattaaaattacaattaaaattacaaaattaactattaatcctattaaaatgttgttcagtgaaaattcttataatacaattgcattaaatgcaaatgcaaatgcaaatgatcatcatgatttatatcatgatgatttatttaatgaaactcctaaagttttcaatgatgatttattaaatcaaattgatttaaattttatctctcctactatttctgattcagatcaatcaattaattctcctgattcaatcttatcaagtgatgatttagaatttgatttacttaaaccttttattgttgataataatactattaataatgatattaaaattaaaaaggaagaaattgatgaagatattttctcaaatgaaattaatgaaatcattcatgatgttttcaattctgttgaattagaggaaagatctgtttcaaatcctgttatttcttttaataatgaagatttagatactatttctaataataaaagatcattttcaacaactgatttatcatctaattctaaaaagaaaactaccaattcaaagaaacaaaagattgatgaattaggttgtactccatatacaagaaagcaaagatttaatccattaccaccaattgtaattaaaaatgatggtgatgcagcatcaattaaaagagctagaaatactgaagctgcaagaagatcaagagctagaaaaatggaaagaatgtcacaattagagaataaatgtgaagatttaattaatgaaaataatttacttaaattagaaattgaaaatttaaaaaatttattaaataaatagagtctaatttttttataatctataatcttataatctataatcttttattacttcactatactatactatataatacgataatatcattataatactaataataaaaaaataagctatcaccagacatgaaaaaaagtaatttgaggatcttctgagagatacgggattcgaacccatgtcaccagcttggaaggctggtatgctaaccactacactaacctcccaaattacttatacgtctcaaatgaagaatcgtccatttctttatatccttgattatgtaagcataaaagaaagtaataagatattattctattctatgaaagacattcatatagatatcattataagctcttatagtacattatagtataatataatataatataatataatatacttcactatacttcactattatctaattaaccaataaataagcccatagtaaaattttcaattttcaacttcgcgaatataatgataataatgataataataataatattcacgatgtttaccttttactatttaccttttactatgttcattaattgatctctattcctttggcaaatgctggaattgatatgggtaatactatctccattgagatatttatttaatattaataatattaataataataagaagtcctcttctcctactactactatagtttacaaaaatatcaataaaccaaattatattcaaggtgaaaatgaagattcaattcctttacaaattaaatcattaacttaccttttccatagatttaaattttataatttaaaacctttattaattaaaaaaatagtagaaaatgatgataatgaagaggagaatataatttatgattttgattattttaatattgatgataataataataataaagacccctcatataatatactaattaatgaaaaattagattcaatttataatattcattattttaaaaatcaattccttaatgatccttataaaattttagttgattataataaaaataaatttcgttctttattaattttatcaaatgaaccttcaactaataatataaataataataataatataaattatcaaaatcaaatacccattaattcaaattttaaatttttaattttaaatccaattaattcaattaataattatattgatataataataaataattcaaatatttatattgaacataaagttaataaaaaaattaaaattgaaatattgaaaaaaataattaaaaaacaattaaagaagattgatattgatactaatattgatgattcaacaataattaatttttcaaaagatgatcgtgcaattataatttcaacttatgttcaaaaattagctttccatattcaagttcaaagattatataaggcaactttaaagaaaaaggctaaatcaaagacaaaatctttatcaaatcgatattcaactaataatcttaaaaattttgataatattaataattataggaaattaaagaataaaaaatcttctttaactttattacctgaaacttcattatcatcttcctcctcatctacaacaaaagatttatcaattttaaattctaatgatgataatgatgatgatataaattattattctgataatcaagatagtcaagcttcaagtagtacaaatagttcaattaattatttaaaattatttacagatgatgaaaagcaagcttgctttaaagatattaaattaattgtaagaatttgtattgaaagacaaagaaataattatatatagaatagttatcttatcttatattatatagaatttaatgcatcacaatattgttgacaaagatcagaataataatctaattttgaatcatttaaaacattaaaacataaattaccattggggaaattaaatttttcaattaataatttaattaattcaatacttttagtaaatcttaaaatcatttcatttttattaattgtttcattcattaattcatcaatatgttcaatttcaattaaaaatcctttaaaattaccatgtaaaagacaattattggtccttatcttaaatttttcacctttattatcactacctaattcaatattaattaaatatccaatacctccttcacctctaattgtttgctttaatgtccataaactttgtaatttattaactaataataattctaaattttcattacttttattattatttaaattattacaacatccatttaatatatgttcctttaattttaaatcattattattaattgaattatttatatttggtataattgttaaaatacttttattattatttataatactaatcattctattattattctcttcattgtttaaatatgataattgtaatgtatataaatatctatttggtaaaatattatcaaattcattatgtccattttcattattattattaaatggtttactaaatttattattaaggaatatacttaattcaaattcccaatttggtaaggtttcaagtgttaaattcattaataaatcatgaaatttggtaattgtagttggtgatgcatgattaacaaataaaattgctgtaaccattgtctttgttcaaagaaagaatatatcataactacacaacatgtaaatttgatatgtgtttttttcatcaacaaaaatttaaaatcttcttttgatactttcttctttttctatttcctaaatacaatgtttacaacacttgaaaggaaacgtcaaatatctgaagatttagaactaatagaaaatgcaattgttaaaagattatgtattaatccaggtattttaaataatgatactaataataataccaattttgagaaaagtacaacaattatgatgaaacatgaaattaataaattaattaattgttatgaaactcaattgaatgaattaaaaaatgttatgaatgatgatgattcaatattacatgatttaaaaatacttacaagtgataatttaattaattataaatcctttaataataataatacaaatattgatcatcaaatttatgaatttttttcaagtgatgaaaatttcccaattattaagaaaaaattagataataatgaatgtaaaaataatgaaaagtataattatttatctaaatatgcaagtgatttgaataaattggaaatatttgataaatttgaacattttggtgatttccttaatttaagagaattttataatatttggaaatctttacataatgaacaaatagattataaacaatatgttaaagatataactaaaaggtcgaatattatacttacaataactaatcaacaacaatatgaagattatcttacacaattgttacactatttattaaacttctatgaaagattaaatccatttaatccaatacctatattggaagaaactaattcattcaaacatgatcctcattattgtttatcttgttgtaaattattctctaatgaatcatcatataattcacatttaaagggtaagaaacatttaaaaaatcaattaaaattttctcaaattttgacaactgagagtaaaatagtttccatgattggaaatttggaaaatatttggattaatacaataaatgaaattgaaagatttgaattattaacttatcgtgaacgtgaaatggaaaagaaaggaattggtaaaaaattaccaatatctacatatcataaagcaccaataaaattatttctttataataagaatgatgaaattaatgatttaaatattaaaaatgatgaaattgaagatgaagaaatgttaaataatccattaaatttaccaattggattagatggtaaaccaataccattttggttatggaaattaaaaggtttatcacatattttccaatgtgaaatttgtgataatgaaaaatttcaaggtagatcaaattttaataaacattttaataatgaaaaacatagagatggattgaaaaaaatgggtataaatgttaaagattttaaatattttaaagatattaataataagaaagaaattgaagaaattattaattatttaaataagaaaaatagagaagaaattcaatttaatgatgattctgaacaagttgaagatgaatttggtaatttaatgaataaaaaagtttatgaacaattaaagaaacaaggtttattataatgtaatgtatataagaacactatttagaatatttagaaagataattatcacattgatttgataaattttcatcattaacatttaatgcatcttgtttaactaatttaattaaatttaaacaagaatttaaaactggtggtttaaacattattaaataaagtataacttgaaaaatcattttattccttaaaggatccatacaaagagattttaattttaaaataatttcatcatttaaatatggtaattcacttaataatctaataattaaatttctatcattattttcaataaatggtaaaattgaatcaattattttatttgtataaattaaataattattaatatttgttttattaacaataaatgatgaataatattcttcattaagccaaataattatattatcaatattttgctttaaatcattttctttaaaataattaaataataattcacgtaatttatttgaataaattgtattaatatttatacctcttgtaattaatcttattatataattaattgaaatttcatttggtgatgataataaatgattaatttgtaattctttatcagaatcttttaatattgaaggagttcggtaattcaaatgattgtggtggtggtgaaggtgaatgaattatcactggtgaatgtgattcatgtattggtggtggtgataatgatgattttataatgttttgttgataatcagattcattctgtatttgtgattgttcttgtatttgttgttgttcctgtatattattattattattattcacttgattatcagtttctttattttcttcttgtaattgatttttataattaaaacatctattaattataatacttaaagcataatttaaatcatcatttgaaacatttttcaatgattcaataattaaattatttcttaaatttggaatcaagtgatgaaacatttaatgaatttgtattatcatccttagtatcataatttggatctattaatgaaaataatgatttataatttaaatttaatggtattgaagattcattgaaaaatattggatgatttggatcttcctttaaattatctttataatctaataaatttttcttatatttaattgattcatcaatcatataagataattttttagaaaatcttgattttaatggtaaatctttatcaataaatcctctatttaataataatgataataaaattttatctaatctatcattaaattttgataataaaatattttttaaaagtttattaaaataatttgaaaatttaaattgtgattcatatgataaaataaaatttaataatttatttgaaattaattgagattttaatttaaataatgacattaaaattgataaaattgttgaaaatattaaagttgaatgaattattggattattaatataattaaataaaaaatcaattaatgaatgagcttgattattaattgatgaattatataaaaatggatgatttgatggtataattgaattattatttggtaattgagttaaaataattgaatgaattaattttaaaattgctaatttacaaccaattgaacgatttaaatcattatgtttatttaaaggatttaaaggatatgaagtatataatttatcaattaaataattatttaaatttgataatttattccaaatctcttttaaaggattattaattaaataattgaaaataaaattataaattgaataataaatttctaatgatttttgaacaattaaagttgaaattgaaggtttatcattaattaaaagtttttctaataatggtaataataaatgtgaatttgattttcttaaattaatatcaaatttatttgtaacaaatgctgaatgtataaaggatacacaagctaataaaacttttgatgataattcattattattagctctaactaatgcaacatccaatactgatgaaagaatttgtgggaagtacgagggactctctctagccagaagtgctgcctgtacaatctgtgatggatcgtccatactgtttggtcaatgataaaagaaagagaaagaaaagtgaaataaagttattgaaaagtttcaaatttcatgttaccagattcgaaattatttcattacatgagaaatcgtgtttgaaggttttcaggatatgtctggtttttcgactatattctaaacgtatatgtatggtcatgacagacatgtagatagtgaactgtctaaataggacaactgtgtatttagctttttaaaaaaattaaaaatgaaagaagatacacagtaaacatacattatataaactaatctgatgattcatctacacatttccaagtacaattaatatcccatcttgaacctggagcatcgaagctaacatatttaacaaatttcataactgaaggatctctaaacattaatgaaaatttattccaacaagcttgaccttcataaacaacactatcttgatctgcctttctataaattgcagcttcatcctcattcagaccttcattattattatctttcttttcactctcatcatcatcaattaaacatagttcataaccaccccattcaccagtttcccaacctgaagttggagttaaatttaatgttgattctaataaaccatcaacataattattatcattatcattatcatcatcaatatcaatatcattagtatttttagttgcaagtataaaatcatgaccaggtctaaatcttctaattataatttgatctttcattaattttaattcagttattttagttaaccatttcctaaatgacatacttttaaacattttagctaaatcacataattttgaactaatttctaaattctttatagctttattattttcattttttttaaaattttcaaattctttatcattaatttgatcttttaatttaaatatttgactagttaaatcaaaattactattatttgagaaattttcacattgatttataattgaaattgattcagatgaatttatatcttcaaaatttgtaccatcaatatacataaatctttgtttatgagaaggaattgctaatttccaaggaaattgattttcaatttgtttttgattaattggcattgaaggatattcattaatttctacatttttcattaaatttttcaataaattttcataatctttatttaagaaagaataaatatcaacaactgattcattattgaaaatatttgataatttattaattgaatcattagttaataatgaaggatttaagaaattagataaataattaatatctaaattatttaattcacttattgaaattggatttaaaattttagataattttaattttgggaaatcataatcttttaattcctttgattctaattgttgtaaagttgatttattttcagtttcttcttgttcaccaggtatataaccatcttcacctaattgaggtatatgaaaccaaccttgtaatgataatctttgtttatcaactttaacttcttcaacggcatgaaatgataaacctggttgaacagtgaaaaaagcaatttgattaaattgaggaattaattttgaatgaatatctgattttggtacatttggaactaaagaatctaataattgtaaaccaccaccataatgatttttccaatttgaatcaggatcaggcatataaagaatgaatgaaactctacgagaaccaataacatcatcatgagttaataaatgacaaccttttgtatataattgaattgataaatctgtctttaaaccacttaatttaccacaattagttatatttgaaatgaatgaacggaaagttttagaataaattgcacttcttaatttatataaacttggtaaacgttttaataaatcatcaggcattgcagataaattagctaaatcaccagattggaaaactttataaatatcagtttcctttttagtaaattcaatttctgaaataatttctttcctaacatttcttaataaatcatcattaattaaatttttaattgttccccatttaaaaggttttgaattttcaacatttttttttaaatttaattcaaaatctttattgaaaacatgagattggaaataatttttagcttgagcttcttcttccggagtttgtttaattgaaattttctttttcggagtagttagagtttgattatgagattgattattagtatcgatatcgatatcagtatcatcaggtaaatttcttttctcaggcataatgtgtgatgagagatattatgtgatagtactaatagaaaaggaatcaaaagcagatacagaagcattaataccattaaatatcgtcagattcagtactacaaccttattataaaatattttcatgatctgattttgaaaatgaaattaaaatttaaaaataaaattataattattacgtaatacaaataagtcacgtgatattacataatcaggtcacgtgataatataaatattaattaataaaggtgtacagaagtaggcaattaccaatttaagaatattgtttacataataataataataatactaagcgaataaacttcaattttctgttagtacttaatattaatattattacctacatgaaaatagtattggaaaaattatcatcatatttattattagaaggtggctgttttattttattttattatagttttgtttagtcttgtttatttgtatatatagcatatagtatatcatatagtatagtatataatgagttataatccttatgctgaagataatagcaatccatatgctgaagattcaaataatccttatcaaaatgattcttatgaattaaatgattataataataataataaaaacaataacaataatgataccaaaccaacaaatgattattcaaatgaagattttttcactaaaattcaaaatttaaaagatgatcttaatgattataatggtttaattaatcaattagaaaatttacaaattagtgcattaaatgctgttagtgcagatgaattaaatgcaattaaatctcaaattgatttaacttcatcaaatttaaaatcaattcaaaatttagatattaaaccaagattagaaaatttatttaaatcttgtcaaggtgataaagataaagaacaacaaactgaaaatttacgtaatcaatttcgaatttcaattcaaaaatttgctaaagttgatgataattatcgtcaatcaaatttaaataaagcaattgaacaatatcaaattgttaatcctgatgcaacttataatcaagcttatcaatttgttgaacaaattggtaatgaacaagttttcgatgaagcaattcaattagctaatcgtaaaggtgaagcaattgcagttttagatgaagttaaaacaagacatcaagaagttttacgtgcagttcaattaacttcagaattaaatcttttattaaatgatttacaagatttagttttccaacaagaaactgttatagattctgctaataaaaatattgaaactgctcaagatcaattagaacgtggtgatgctaatgttataaaagcaagagatcatgctaaaaagggtagaaaatggagatggattttattttgggttgtggttgttttaatttgtgcaattgttggtggtgtcgttggtggtgttgttggttcaagacattaatataatatattactattactattactctcatttcaatcgtttttagtcttattactttcacttctactattctaatattattaacttcatcttctttttattctaatttatatttatctattttgtaactaactatttagtcgtttttttttgtaataattatcttaaaagtaatatcttcgcttaatatacgagcacaacattctttttgtcatgatagctattgaatttacttatatctctatattgtaccactataatgatagcaatagagctataattgtagtatataatacttatagtagtaaggtatctatgtacagtaaaatattagcaaaaaaacgggttcaaactacttattttaaaagaaatatatttttttaagggtcctaaaaagtaaaaatagctgttttcagacatcaactaggttagattttatttaataaaaatatctacagtctttaaaatacaacaatacaccaggtctgattatatggaattaaatgtacttaaataatatctaaaaaaaattatacaataactaacacactaattatcatcaacttgaactgaaccaccagattgactaattgcactccaccaagtattaaaatcatcagctgaacttgccttaaaaatataagtatttttcttaattgttaaacttgataaatctttaccacgtaatgaaaatctaaatccatgttttgtatcattacccatattctttgtttcacaatcaggtatatataaaactaaaattggatgattattatcaaattctcttgatgggaattgataaaaaaatcctgcagttgttataacaaaataaaaatttttataacttttatttaaacctaattttgattcttgacgtgataatgtaccttctaattttggcattgtacttaaatgattatcattttgaaatgtaatattttcaattgatcttttataaggatttttagaaatacaatttaaatttttatttgaatcaattgataaattacttaaagttttagttaaattatcattatttaaattaccattattatcaattgatgaagtaattaaatattttgaatttttagtaataaaattattccattcagaattatcagttatattaattaaaacattatttaaattaataaaatcatttgaattaccactaaaatcttcctgaatataatttgttaaatttgcaaaaattcttttcaattcagttaaaatttttgattcaaatgaatgtaatgaagtttcacttgttgcaataaattcaattgttgaattttcagctaaaatttgtaatgatgcatcatttgataatgatcttttaacaaaatatggatcttttttataatcaatatgattatttcttgaattattaaaatgtaccaatatcaaattcttgaactgaattatctaaattttttaaacttttaattgaattttcctttgctttatctaaatctttatgaattgagttgttttattaataaaatctttttgattttttaaaacttcattaattaaattatttaaatcaggtaaaatttgattttcaatatttgatttaaaattaattgattttgaatattgatttgataaattttttcttaataatgataaaaacatattaaaatcatgcattttcaattttaatattatttggatcaatatttgaatcaatatttgtatcaattgataaaatatcagaattatcattatcattattatccatattgatattagttggtaaatttaaagtttttgaaccactaacagttgtattattattatttgattcaaaatcagggaatttagttgacattttattattcattaaatcatattgtttaattgaagcaattgccattgaattataaccatttgtaataccttgaattgttttaattaattttaaatattttttataacgttcaattaaaatattagttgaatcagggaatgaataattaattaaatcagttgaaggtttaccatttgttaaaggatcagcaggagaaatattaattgaaggagtatttggtttaccagttaaaacagatttaatttgattcatatttgtttattataagaagtaaaatgaatataatttactctaaagtatctaacaaaaacagttcaaacataaacaattactgatcatcaggtggttccggagatattattgatgttaattgggctgtgaagaattatcaaatttgacatgtctcacactagccacatctgataatgaaattacttagtggcgcagcaagtcacgtgataaacaggcacgtgacaataaattttttttccgcggatttatcgcgtaatataactcagtatttacattctattatgacaatttaacaagactttattggttctgttattagtaggtattttcaagggttctcttatttagacaagtataattatataattctaattatagttaaatcattaagggtctattgcatcgattattgatgtattatctttatctttactgttattataatatttttgatgatatatcaatgtacatcttattatatattattatattatactctataaattaaaataatcttaattccggcctttgaattaattaatttgctctactccttatacctattatcatacttaatgccttattatggtagcaaaaccctctgaatccgtcttctgctttaactacctgttttatgctttttctttgtttatttcttttctactttccactgcctttttttctccactcttttatacaataaaatattgttacattgtattttatattattggaagaaaatgtaattcaccactatacctatatagtctgttgaaaacttttttttctgtaatgtattattatcatcatcattatcattatcatcatatctaacacacttcttttaactaaatcaaataatgaacgatatatttaacgttcaaattttctttgtggtatttagagaagctcttgaagctgttattgtcatttctgtccttttagcatttgttaaacaatcaattggtgaaaaaaatcctcaagttactaaaaaattagttaaacaaatttggtttggtgcaattacaggtataataatttgtattgcaattggttgtgcatttattggtgcatattattcattgaaaaaagatatttggactaaaactgaagatttatatgaaggtataatgtgtttaattgcaacaattttaattactgcaatgggtattgcaatgcttagagttaataaaatgcaagcaaaatggagaattaaaattgcaagagctatagttgaacctccaattaataaatctgatagattaaaatgtggttatatgattaaaagatattcaatgtttattttaccatttataacaactttaagagaaggtttagaagcagttgtctttgttggtggtgttggtattggatcacctgcaaaatctttcccattacctgttgtttgtggtttatttgcaggtgctttagttggtgggtttatgtattggggtggttcagcaatttcattacaaattttcctttgtatttcaactgctattctttatttaatttcagctggtttattctcaagaggtgtttggtttttcgaaaattatatgtttaataaaaaaactggtggtgatgcagcagaaaatggttcaggtcctggtacttataatattaaatcatcagtttggcatgttaattgttgtaatcctttaactgataatggttgggatgttttcaattctttattaggttggcaaaattctgcaacttatggttctgttttatcttataatctttattggcttgcattaataattactttaagtttaatgttatttgaagaaaagaaaggtcatttaccattttgtaaatcattacaattaagacaattaaatccaatgtattatattaaaggtaaaaagaaaaatgaattaacaaaggaagaagctgatttattatttcatcaagctcaaaaagatttaaataaaagagtttcaaatgaatcattagtaaatgatattgaacttgaaaatattataaattcaactacaccttcaaatgaagaaattgtggttaataaataatttatttatttatttatatacatctctaatctattattctctaacaactaaactggtagcaagacaatgtatgtaataatcatacacaagattacgtaataataggcaaaagcccaacaaagaaaccaacaaaacgtgtaacatgaattttctctcgtttttccattttctcagcactgcagataaatacccgctactcggctcagtttaatatacttgcttgcttgatatacctccttttgtttgcattttcattaaacaatcgtcacatttatccacaatgagacctgaagtacaacaagaactttcccacattcttttaactgagcttttagcatatcaatttgcttctccagttagatggtacgtatattatcttatatctttattattaacaatatactaactaaacatttaatataggattgaaactcaagatgttttcttaagagattacaagactgaaagagtcgttgaaattggtccttccccaactttagcaggtatggcaactagaactattaaggctaaatatgaaacttatgatgctgcattatcattacaaagacaagttttatgttattcaaaagatcaaaaggaaatttattatactccagatccagctgatttagcagaagcagaagcagaagctacaccagctcaagaagcaaccccagctgctgctgctgctcctgttgctgctgccccagttgccgttgcagctccagtcgctgccgcacctgcagcagcagctgcagatgttgcagatgaaccagttaaggcaagtttagttttacataccttagttgctcataaattaaagaaatcattagctgaagtttcaatgtcaaaggcaattaaagatttagttggtggtaaatcaactgttcaaaatgaaattttaggtgatttaggtaaagaatttggtagtactcctgaaaaaccagaagatactccattacaagaattagcagatcaattccaagatactttcagtggtgcattaggtaaacaaacttcatcacttattgcaagactgatgtcatcaaaaatgcctggtggattctctgttggtgcagctagaaaatatttacaatcaagatggggtttacaatcaggtagacaagatgctgtcttattacatgctttaactaatgaaccagcttcaagattaggtggtgaagctgatgcaaaggctttctttgatacaattacacaaaaatatgcttcaattgaaggtttatcattatcatctgcaagtgctggtggtgctggtgcagctggtggtgcaggtggtgcagttattgattcagctgcattagatgcaattactaaagaatctaaagatttagctcgtcaacaattagaaactttagctagatatttaaagattgatttaactaagggtgaaaaatcattaattaaagaaaaagatgcttcaaaggttttacaagctgaattagatttatggtctgaagaacatggtgaattttatgcttctggtattaaaccagttttctctccattaaaggcaagaacttatgattcttattggaattgggctagacaagatgctttatcaatgtatttcgatattatctttggtaaattaacttcaattgatagagaaacggttactcaatgtattcaaattatgaatagaactaatccaactttaattaaatttatgcaatatcatattgatcatactccaactgaaaagggtgaaacttatgaattagctaaaaaattaggtcaacaattaattgataattgtattgaaatgttacaaaaagatcaaaaacctgtttataaagatgtttcttatccaactggtccaaaaactactgttgatgcaaagggtaatgttaattatgaagaaacaccaagagatgcatgtaaaaaatttgaagaatatgttcatgaaatggctcaaggttgtgatatgactaaagaagttaaaccaactattgaagaagatttagcaaatgtttataaagctttatctaaacaagcatcaagtgaaaatcaattaaagattgaaactttatacaaacaattaattgaatttgttgaaaagaatcctgaaattgaagttaaaaaatcaactaaaactgttttagattcttcatcatctgatgaaactagtgaaattgcttcattaaaggattataatgaaattaataaaccagtctcatctactattccaccagaaactattccatttttacatattaaatcaaaatctaagttaggttcatgggattacgataaaattaaatcatcctctttcttagatggtttagaaaaaggtgctgttaatggtatgtcatacaagggtaaatatgctcttattaccggtgcaggtgctggttctattggtgctgaaattatgagaggtttattatctggtggtgctaaggttattgttaccacttcaagattctctaaaaaagttactgaatattatcaatcattatactcaagatatggtgcatcaggttcaagtttagtcgttgttccattcaatcaaggttctaaacaagatgttgaagctttagttcgtttcatttatgatgatgttaagaaaggtggtctcggttgggatttagactttgttattccatttgctgcaattccagaaatgggtattgaagttgaaaatattggttctaaatctgaattagctcacagaattatgttaactaacttattaagattattaggtgaagttgcaactagtaagagaactagaaatattactactagaccagctgaagttattcttccattatctccaaaccatggtacttttggttcagatggtttatactctgaatctaaacttgcactagaaactttattcaacagatggcattcagaatcctggtcttcatacttaactgtttgtggtgcagttattggttggactagaggtactggtttaatgtccggtaacaatatgattgctgaaggtattgaaaaattaggtgttagaactttctctcaaaaggaaatggcattcaatattcttggtttaatgactccagaagttgttagaatgtgtgaagatggtccagttatggcagatttgaatggtggtttacaattcgttgaaaacttaagagaatttactaatgatttaagaactgatattaacaatacttctgaagttagaagagccgtttcaattgaaactgcaattgaacataaggttgttaatggtgaaaatgctgatgctccattcaacaaggcagaaattgttccaaaggcaaatttgactttcgatttcccagctttatctccatatgatcaaattaaggcaaaggctccagaattagaaggtttattagatttagacagagttattgttgttactggttttgctgaagttggtccatggggtaactcaagaactagatgggaaatggaatctaagggtgaattctcattagaaggttgtgttgaaatggcatggattatgggtttcattaaatatttcaatggtaacattaagggtaaacaatatagtggttgggttgatgcaaagactaatcaaccagttgctgatatggatgttaagaagaaatatgaagaagaaatcttaaatcatactggtattagattaattgaaccagaattattccatggttatgatccaaagaagaaagaattaattcaagaagttgttattcaacatgatttagaaccatttgttactgataagccaactgctttacaatatcaattacaacatggtgataaagttgaagttttcccagatgaatcaggtgaagaatataccgttaagatcttaaagggtgcatcattatttattccaaaggcattaagatttgatagaatggttgcaggtcaaattccaactggttggaatgcaaagaactatggtatctctgatgatattattagtcaagttgatccaattactttatacgttttagtctccactgttgaagcattattaagttctggtgttaccgatccatatgaattctataaatatgttcatgtttctgaagttggtaactgttccggttcaggtatgggtggtgtctctgcattaaagggtatgttcaaggatagatacaaggatcaaccagttcaaaatgatatcttacaagaatctttcattaatactatgtcagcttgggttaatatgttattactgtcatcttctggtccaattaagacaccagttggtgcatgtgctactgcaattgaatctgttgatgttggtgttgaaactattttatcaggtaaggcaaagattgttttagttggtggttatgatgatttccaagaagaaggttcatatgaattcgcaaatatgaatgcaacttcaaatactattgatgaatttgctcatggtagaacaccatcagaaatgtcaagacctgcaactactagtagaaatggttttatggaagctcaaggttccggtattgaagttttaatgactgcatcattagcattaagaatgggtgttccaatttatgcaattcttgcaatgtcatcaactgcaactgataagattggtagatctgttccagcgccaggtaagggtattttaactactgcaaaggaatatcatggttcaatgaaatattcatcagctaagatggatattaaatatagagcaagacaattcaagaatagagttaagcaagttaaacaatgggttgaaaatgaattagaagaagttcaagaagaagctgaattattagcaactgaagataaatcatttgataaatccgaattctttaaagaaagagcagaagaaattgaaagagatgcatcaaaacaaattaaggatattcaaagacaattaggtaatgaattctggaagaatgatccaagaatttcaccaataagaggtgcattagcaacatttaatttaacaattgatgatttaggtgtttgttcattccatggtacttcaactaaggcaaatgataagaatgaatctgcaactattgataagatgatgcaacatttaggtagaactgaaggtaatccagttttcggtgttttccaaaaattcttaactggtcatccaaagggtgcagcaggtgcttggatgttgaatggtgcaattcaaattttaaattctggtactgttccaggtaatagaaatgctgataatattgataaaattttagaagatttcaaatatgttttattcccatcaagaactattcaaactgatggtattaaagcagtttctgttacatcatttggtttcggtcaaaagggtggtcaagcaattgttgttcatccagattacttatatgcagcattatcaagagatgaatttgaatcatattctaagaaggttgaatcaagacaaaagaaatcttatgcatacattcataatgcaatgattactaatactatgtttgttgcaaaggaacatgcaccatatactgatgatcaagaacaaagtgtttatcttgatccattagcaagagtttcattagataagactaatcaatatagttttactgataaagaattacaaagagaaggtaaatatgtttcaaatactgcaagtaaaactgcaaatgttttaagttcattaacaaaggaacaaattggttcaaagggctgtcggtgttgacgttgaattaatttctgaaattaatattgaaaattctacatttattgaaagaaattttactgatgaagaaataaatattgttcaaaatctgcaaatccaagatcatcatttgcaggttcatggtcagcaaaggaagcagttttcaaatctttagaagttgaatcaaagggtgcaggtgcttcattaaaggatattgaaattgttcataatgctaatggtgccccaactgttaaattaactggtgctgcattagaagctgcaaataaaaatggtgttaagaatgttaaagtttcaatttcccatgatgatgttcaatcagttgctgttgcaatctctgaattttaattagattttaaataattagattatagtattcatttttagttttttatagttttaaatttaaacaatttttttgaatattaaaagtaaaagctttatataaaatatgaaatgtaaagaacatgttaaataatgatattagtgtaaaaatcagtaataaaaaaagatgggtaattctatatgagagaaaagtaaagaaaaaaaaacataaaatgtattttaaaaataaaaacataatgtttaactgataaaagaacaaaagaataaataaggagaacaatgatgaaatataaatacaaagacaaggggaaacacaaaatgatagtatatggtacatattttataattaatattgaaataatcggaaaaccagtttcagagtccaataaaaaatgaggaaggtcatacagttttcaaatccatcaaggcaattgctgcaagttcttcaggagatttaccagaatccattggtgttggaggcgttactatacttgattgtctattatttttcaaaaatgttgcaccaacagatttccaatcttcttcatcagtaaaatttgatccatcatcattattattaatataattgatatctgaattatttgtatttgaatatttataattttttaatgaagttaaagtatcattatcatgaatattatgttggtcattactactatcgtgatttccattttcatcaatttcatcatcatcatcatcatctataataacattttcattatctttatcatggaaagatattgaactattattatttgaaaaatgtggggaaatattagttcgtaagaatgattgtcttgataaattagcagaatttgagaatgaaacacgagattctcttctttccaaaggtgcatcatccaattgaacttctaatgaatgttgagtaaatgaagatcttggtttacgaggtttaacaatacctgcaaatgaaggacgatgagatgaagaaacagatggtgaacgtatatttggcattttatttgtagaaaatgaacttgatctatttgtcattctattataaaattggatattattattattattattgtgagaattgacgttattaatattatcatcatcaatatcatctaaatcatcgaaatcatcaccagaagttgaagaatcaatagcttcattaacattaccataagttttcaaagaatttctgaaatcttgaattggagccagagttggagatattggcattttaatttgatgatctaaaatcgcattactaatagattctcttctaagagatgaagctgaaattttattatgatcataataagaagtttgtgaagaacttgagattgggcgactaacattatcattaattgtatttgtatttgatgttgttatgttatcaacattatgttcgatattggaattagcagcagtagtagtattagcattagcatttgcattaagagcagcacttttaattttagcttcaacaatttccttatcaacaactttagcttcccattgaccccaaccaattttttcgaaaatacaattattttcaatatccccagattctaatgaggacattattaaacgtctttgttttgataatgataaattaccaaataatgggacttgtttaattaaatgaccagttaaatgacgaattggtaaaggaccttcatttaataaaatattagcaattctatttggagtaatttcatttgcagttgcaataccttcaggtgaagaagttgataataagaatttttcttcatttgttgaagattttcttctttgttttttctttaaagttggaacaatggtagaagtattatttgttggagattgaattaaatttgaagttgcagttggaggtgggcttggacttgaagagaatgaaatatttgataaaggtaatgaagaggatgttgtattaattggattattcagtaaattattaatatttgggacaattggaagatgaggagatgaaattttatcatctataaggttcccatcatctgaggacctatgaggcagcattttaatgattgataattgttattaaaagagatataaacagtcttgataaaaggcgatgagatgaattgattgaatagataataagatattgccacagtgaaatttcaaaattgataaaacaaaccggggtagtgagaattattattatgactgttattatatgatcattatcaattattactgtttttattgttatataattataattaatatagttattatttatatatattaaattagtagtagggtaatgacatgtgtgtatttgattaaaataagtaagtaagtaaataaatagataaataaataaatatttatttgaattttttaattaattattttaaaaaaaatacaacaactgcaagataaggaaccaattgatttatttttaattaatcaaacttaaagagcagggaagttcttgtcatttaattgattaacgactggtttagaactttttggtttaccttggaattttttgttaccaccatttctaccatttttcttaaaatcagatctttcatggtctttcaggtctttcaaaaccacttgacattgtaatattagctggaacaaattgtttttgttttaaagttttagatttaactttcttttcaacagttgctggaatgaaatcttcaacaactttaacaacaattgatgattcatcaatttcagatgctgaagatacagctttctttgatttattaaattcagaattttgtaattcactaaagaaatcagcagcagatcttaaaactggttttgattcttcttcttcatcttcattagcattttcagtaatttcaatttctgcatcttctgcaccttcaatttgagattcagcttcatcacctaatttgtttttttgagatttagcagtttcattcttaccagttcttgaatgtctatcaaattttttatctttaccattctttcttgaagttgatgatggaccatttgaatctctatttttattagagaattttgcacctgcttcattacctgaagctcttggtttaccacctttagattttgatggatcatgcctttggtgggacaccatccttcttagtagatttttgtggagcaacaatttcctttggtgcaatgaaatcatcttcatcaccggaaacatcgttacctaataacgcataaaggttctatattataacacaatgttagtaaaactcaattccttttaattcaatcatataatcataaacttatacataccttattttgcatagacatgtttggttactttaaagcaatgtaaattaaacacaacaatgtgagcaagtccaagcaaatagataaaattgacacactatttttcactcactggaaatcgacgctgtggggaatgttagacatttactatattaaaattcttactatgcggtggcaggggggattctgggtttttatttttgatttttttgctggtgcactgttacagtcgcatcgacgcagaaacggggctcagtatctattttagttttagttttatttactatacttttatttaaatctaacacaatataatctattcattcttgactgttcttgttggtaatacatacaccgttccaactctcgctaaaaatccacatagtacctgtcttaattcatctcctaccataccaataccaactccactaactaatttaattacatcttcataaacatttggacaaactttttggaaatcttcttcataaaattcagttatagcttcaagtatttcaacaattactggcatccaggattgtaaatttcttgtctcagatctctcttcaaattcaatccccctctctaataatgatttacttaatggtattaatttttcaacaattatttgtcgtccttcatcatcacatttatccttatcacaataaactcgaaatattatactaatataaactccaactgatgatgtttcctgttttaataaattaggtaatttatcaacaatccctccattccataatctaactcttaattcataatcttcattaaatttcttggcaaattcataactttcaaataataatttactaaattcaattaatgtatcatatgttatagtttcataaaattcattattatcaaataattcacttaataattgaatcatatgtaaatgtaaaacacatttaataacaatttcttgtgatgaaaattcttctttatcattatcattatcaatatcatcatcatcaccttcttcaacttcatcttccaattgctcttcctcactaacttttttattattattaatttgattattcattaatggatcaagttcaaataattcaactgctgatgttagtttgaataactctttaaaggttatattaatctttttccaatgttcattatcaaattttttcatatttgtaaaattaaatcttgtaaacatgaaattccaattttagaaattgcatcattatcttgacaaatacatgatattaataaacttaaatatccatccatcattttacttaattcttcaaaaaatgtactaaataatataatcatctttcttaatgcttgaatcagtgtacttgataaccaaacccataatccttcattttgattaaaactaatatctccatgtctctttaatatatcaaatattgggaataataattcaaaacatattttcctccatgatttttcattaaatttcttaccatgatcaattaatgcttcaaacataaaatttaatgccttggatctaacttctaaatcattaccttccataattatattattaaaactgaaaattaatgtaaaccaatatttattaaaatattcttcatcatttgcttattctcaatttcaatttcattaccacatctttcaactaattcattaatcattgataatgattttaaactaattttttgaaatctctcatttttacaatattcacataaacaatcaactaattttttaaaactattttgctctttaatatcatttaaatgttcatcaattatttctttaacaattgttaaaccttttaatacaaatttctcattatcaacattaaatccaatatgttctaaaatttctaaaattgtactccaacctgatctaattaattcagattttttaataattaaatatttaatacaatctaaaaccatttccttaacttcaagattactattattaattataatataatcaaatggttttaaaaattctttttgaaatttaaaatgtgataattcttcaatattgaaaaatctttcagataattgtcttaatgaatcaattgcaaaaattgaaactttattatttgaattacatccaaattcattaaattcttgattcataactttccataattcagaccattgtaatctaattctactcatattataataacaaacatcaactaatttttgtaaacaaaacatccttggttcattactattttcactactttgaatttcttctcttgcaacttcaattaatccttcaacaaattggaaaattccatctccttcaatttcattacttttactgaaaactttatcaattaaaacatctaattcagttgaatttattttattgatcatttcaattggtaatttttgattaaaatgatgtaataaaacttgttgtgacatactttgtcttttactattaccactaattgcagcgaaaaacccacttgatgcattattttcattttgaattctcttaatatcaatagattttttactaatcattgcattaattaaatcaggtacagaatcagaatttacaccctttgataataatcttaatctttcaacttgtgaaataacaataaatatatctttccatgaatcatttaaataagatttttcatcaattgcaatatctaataatgtataaattgctttaatatttttatctttcatatcttcaggattattaatattagtaaattgaactaaacctctcaaaaatgattttctagcatattcaatatcaaatatacatgataaatgaactgataatctaatacctaataataataaatctgcagtttcttcatcatcatattctttaaatggtggtgttaaacctgctaataatgacatccataaagtatcaaaaattgatctaacatgttctggattattgttaacattttgttcaaatgtataatattttaaatttttagttttattatttttacctaatgatatcactgtactttcagtttttttacttaatacttttgatgctttactataagcttcctttgcataatctctaccaaataaactaccacctaaaattagtgtttgttgattaacagttgaatcatttgaaattaaagcagcttgatgttcactatttaatataatttcgttattttgaatatctttgaaaactccttctaaaaatttaatatctaaatctttaccatcatcaatacctctattattcttagcaaattcttcaaatgtcattctttttttaatttgtggtgaatgttgatctgtatttaacataattacagaatatgataaaacatagacagtatcggcatttgcaaatgtatttggattatcaacaacatatttttcagcaaattttaacataaatctatcaataacttgtgattcaccaggtaatctaaaatgttgtaaaaataatcttaaagaatcaagaaatcctaaatttttaaaatctaataaatcaacaaatgaatgcattacttgaatattctcttctttactaccacctaaatattcaccaatttgagatttatctaatgaatcattttccataataaatttagcaatactttcataattagttttatcaataaatccattttgtgataaatatgcaatacctttctttggtgaataattaaataatttaataccttcaataagggaagttttacgttgtttaacagtatcaaattgattaatattatttgttaaatgatcctcagattcttcccttgttaatgaatgattattaacatttgaatcagaatgtgataatggagaaaatggacctgaagcaattgataaacctctattccttacatcagttgcaattaattttaattcatctaatgaaacagttgatgaagaatttaatgatgattggaaaactaatggagatccagaagttatattcaaggtttgtaaaaatgatataatacaatcaattgaaatcattttcaatgcaaaatcatttgggaaatttaataaagaatctggatttatttgagtacttgaaagttttgaagaatttaattcaggaattttttcaacttctttcattaatgaatgagatttttggaaaattttaaaattattcttttgttgtaaagtacattcaactcttaataatgcaaattttgttaaataatcaataattttttcacataaatttggtaatgttgtatcacaatcataatttaaataaaattcaataataatttttggatcacaacataatctacgtataacttctaaaatatatcttttttgataagaaccagaagatttcatttcaccaagtgggaaataaatttcatccataaaaactggtatttcaaatttaaattcagatcttaaatttttaatcattaaccaataaatttctaatgtaattgcatagactgaagataattgagatgttgcatttcttgaaattgctaaacataaatattttctaataccatcaactaaaatagttgtttcatcactatttttattaaatattaaatgatctttattaacgaaaacatccatataatttttcaaaataagatgaataatatgtaatgataagatcttaactctaacttgatgagatctcatatctaatgaatcaacttcaataacttttgatgctaaattactcattgatctgaaaactaaaaatgcatctttaacatataattcatcttcttcaccaataatttcatcagatgttaattgaatattatcattacttgtatcttgtaattgttgtaaagtcattgtattattttcattagattcatcagtatgaattttctccttttctttaattaatttttgtttattatttaaattcattactttaccataaacggaatcaacaatttgaattaatgtagcttgtgcaataccttgattaattggtgataaagataataggaaaatattattaatttgtctaattgcttgtaataaaactttaccatgaacaggcattgattcattaacaattgcaccagttaaaactcttataatttgtaattcaactctttcatcagttccttcaccttcataacatgaaataattacattaattgcagcttcaattaataaaattttaccttcagttattgaaacatctaaaccagtatctaaatcagttgttgaattttttttatttttcaatgatgattgatttaatgatttataatcccaataaattggttttgtaaataaattaaatgtgaaaattttacttaaacaatcaagagctaaaattttagcttcaatatttgattgttcacaagttaattttaatggttcaaaaattaattcttctgatggcattttattagttttcaaaatttctaaaactgttgaacatttttgaacaattatttgatgttttttcataatatctttaatacttaataatttttcaaagcttaattttaagaatgaaatacttgcattttcatttaaatgtgatgtgttgcagttgttgatttacgtttaattggtgtcatatgagtagttgaataagttgattgttgatcagaagtatggatagaattattatcaatagtaacttcatcattatgttcatcattatgttcatcattatcttcatgattatcaccctctacagtaatttcgatttcattaaaagcctctgttggctcttcattattattggtttctattccatcattatcaacattggaatcattcacattaacatccacagacaaggaatcagatccattgaccacaggtacatcttcctgttcctctattgtcattgtgcaatgcctgtatatccttgctttgcctttattatataaaccaggaggtatattcgttacaatagcagtattcattacctaaacaatttcatcatctcttttttcacattgaaaacaaattcgcgctctactaaattaacaggctgattacataatgattatcattcattcatgtcataacttactctttattactttattttataaaactatttaaagaaaaaaaacaagggaaatcaaaacaaatgcactaattaatactctacaggaaataaactaaactaaactgaactgaaataaataaataatttaaatgataattggaatgttcaaaataaaaaaaaaccagtttttttgttttataaaccttcccattttctaccttcaactttcttcaattcttcagttgtatgaacatgtccattagtgaaataacctgcagcaattttagcatcaatttcaactctactatctgcaggtaataaataatcaggtatttcaattctttcatcaatagttatacctgaattaacaattgcatcatgtttcatattactcattgataacattctatcaattttagtaatacctaaccaatgtaaaatatctggcattaattcttgaaatcttgcatctttaacacctgcaatacattcagttctatggaaatattcatcagctgtatcaccacttctctttcttgcattataaactaaatatttagttacttcacctaaacatctaccttcttttctaaaataacaaactaatccattaccacctttttgtgcttcctttgcagcttcaattaaaccaaaaataagataacatctacatgaacaaatatctgataagaaaacatcagaacctgaacattcatcatgaattcttaatgctaatcttttatcctcttttggtaaattatttggatcaccgaaaatatatgcagttataccaccaattggtggacaaaaagttttaatatcaggtcttgaaattaattcaggatacataccattagtatcttgaaataatgcttttcttaattcaatttcacgtaatatttaatctttctgcaacaccaggtaaataccaaacaggatcaactgcaattttagtacatgccatttcaccttcatcattaagtacaattttaccatcaggaattaaattaccctttttaacttcatctttaatttcaggaattgataaaactgccttagtaattgacattgttggtcctaatttcaacattttcatttttagaaatattatcatataaccaaggagttaaatgaccaaatggatccattgaaacaattttaccaggaattgaccattgcttttgttgtgggaaatcaaatggtggatgagtatttaaataatttggtttatgattaatatctaattgttttgatgcaatacttagagcatgataaattgaataaggacctgaatgtgcaccaattgaattatgtttaatcataccatcattatatttagaaacaacaactggacctctctttaaatggatcagattcataccattcaattggaattggattaatatctgaatcatttgtaaatgtagctaatctaattttatcaccaaagaaatcaataattgcatcattatcattagtattattactatcaaattgtttttcattaatttctaaaccttgttcatgtgaacatgtagtatttccacaaattgttgtcataatgtattgtattgtattgtattgtattgtattattttctaaataaacttgttaaaagaaccaacatcaaactaataacttctaatttaaaatgacaatacccgttccttttatacccaatatcatctataccataaacttaatacaaataaacgttcaattgcccttttttcagtatcagtatcttatcaataatttttttatcttatcttatcttaaatccgtatatctcctgataataccgtataattccttataaaaccgtatatcaccactataattaagaaacggaattatacggagtaatattagtattattatattagtattacttatttattatacaaagatcttacacattgataattggttatattatgattattatgattattatgatgattataattattatgattatgattattttatgaactgactttttaattaaatttcactatattataagtaaagcgagagaggtatttagtattatgaggagattatatgaattaaattgattattttatcaaatctaaaatttgcattgttaaatttgaaatttcatgattatcattattttcaccagttaaattagttaaatctaatttacctttattaatttcattcttaattttatccttaatttccttattattagaatctaataattgtaaaattgtccaaagtgcaatatgttcaaatgttggattcctacttttcaaaaaatttgatataaattcacttatttcattataattttttaaaattattgaataatcattaattcttgaacataaatttgctaatgcagcagctgaattaccacaaacttctaaatttgatgattttgttaatggtattaaaacatcaattatacccatatttaataatttttcctttaattcatctgctaatgctaaaattgcaaaacatgcagaaatttcactttgaacattttcttgagaatttaaaactaaatctttacatttattaattgcacctgcatttaataatgctaatctatttctttcagaacttgcagctaaatttcttaaacttgaaactgcatgacattgaatttcagtatttgaattataatcaactaaatcaactaaaggttttaaaaatcctgtttcaacaattaaaacttcattcattggatgaattgaaatatttctaatacatgcaactgctgctaatattaaaggttcatgatttgattgtaataattgaactaaatttggtaaaccaccagatctaacaatttctaattgatataaaccatcacttgctaaatttcttaaagctaaagttgcttgacattgaactcttgtacttgaagaatccattaattgaattaattgattaactaattttggttcagttaaacttaaaatttttctattttcttcatcaactgcaatatttgataaagcagttgtacaataatattgaatatcaggatcattacttgataataatttaactaaaattggtacactacctgcatcaactaattctttcctattttcaaatgaatgagtcatatttaataaagcaccagttgcatttctttgaactcttaaatcttgtgacattgctaattttgttaaaggtattaaagcaccagattttgcaattttagttttattttcatcttgagttgctaaatttgtaatacaaccaactgcattacattgaacttcaatattagtacacatcatttgtttaattaaaggatttaaaccacccattttaacaattaataatttattttcatcattaacagctaaattacctaaagcagcacaagcagctctttgaacttcttgatcagaactttgcagtaaaattaaaattggttctaaaacatctctattaacacttctaatttccttttcagtaatttcagcaaatgctaaagctgcactcctttgtaaatcaatattatcagaataaaccagagttgataaagctctaagtggaccatcagagaagaaatctataccatttctattttctaaatattgtaataaagttgtaattgcttcacgttcattctctgctaataattgacgatataaaccagaatcttcacgatttttcaaacaactacatgaacaacccataattgaatattataatattgataattgataattagataatatagtaatatatagactaatatagataagataagatataattaaggcaattgatatattataagataataagaatatagagatagaaggaaagtatagaagatatacgataagaatataagtgaaagttaaagtaaagttaaagaatgaaaaagaatgtaaagataagtttaataaaagattctactcacccacccactgataatagaataaaatggttatacatgcatgtaatgaatataataataattattatttgcctctgagggaagtgacttataataattacaataaaacgacttcaagacgcttcaagggaaaatttttattagttagtacagtacacccccaatttctgttactgttctgtttgtattatattacgtaatacgtaatacttcacagacgcgactgcattacctaatcacatgacgaaatagcaaccgcggttccattgcttccaatatcaatttagtattagcaaacgaaaaaaatgtatagaaagctaataaactcattaacgaagtaatactgaaaataccacaaattgaataatggaaaggagtatctatatatcggtaaagtaaatgttaaattaaagtggtaaaaaaagcaaaattttaacattaattaatcaattatatatatactattaggaattatattttaaaggaaaggctaccattcgaatcctgtgagggtggtttgtgctaagtttcgtataacacataacaaattcatttccggatttccggacttgaccgaatgaataaataaataaatagctagatctttcctttaactgaaaaaactgaaaaactgaaaaaaactaagaaaaatagcctgacttgccttaattcaataccgttttaatgcgtcattgcttttagatccgtttatactcaaattgatctaaatcttagtttgatctctaattttaattattttattattttactttttaaacttttctatttttttagaaaacatttcttttttttttgtttttgatattttaattatggatgctattggttctattactttttttcagtcctttggtggaaattgaaaatacctcttttccaaacatttttaattccttatttccgatctcatcctttcactcaccttatctcattaatctgtaccattaattactttttgcactgtatacttaatttacctttaacctttaatataaatagatcaccgaagcttcatttattcattccttcattctttattatgatctttctatctaatatcatcttctcttttttaaaatctttttattcatttactttgtttatttcatttacttcatttaatttacttcatctattcccccatatatcgctgcttttcctctatttcattttgcctctcatctcattataaacttttattttatttcccttttgatttccattttgttagatcttcatctttaatcttcattttctaatttgaacttcacttggatcttatccatattttgttattttatcaaaaaaccgtttgttatctttactattatattctatatattcaatattctatggatatgaataattatcctatcaaaccttcaaatataaatttaaatttaaatcctaatttaaattcttataatcatgatgcaattcgtcaatcaaataattcaagtgtatcatctcaaaatttaatacaaaataaccccgctaatactaccactaatattctatcacctgatcaaaatattcatcaacaaacacaacaacaacaaccttatcattatccaactcaatatcaatcctttaccagtcatcctagtcatccacctcatcagcctcattttcaacattatcccccacctcatcaaactcatcaaacttctcaactatccacctcaatatcaatttcaaaatatatctaattctccaataactcctcaattaaagcacaacaacagtgatactagtattaataatagtatcaacactaataataacaacaataataacaccaatactaatagttcaactaataataattatccttttataacatcaaattatagtcaatctcatataccttatcaatatcaatatcaatatcaaaatatttatcctaatatttatcataatcaatcaaatagtattccaaatacaccaaactcaattcaaattcattcatctttaccatcatcaaaaccttcaaatgatcaaaatattgaagaatttaatgaacattcatcatcaaatttaaattcaaatttaaatttaaattcttcaataaatccttcaagtaaaccttcagcttcttcaacaactgctacatcaatctcaaatacttcaaataatattaatattaataatagtaacagtaataataataatagtaataataatattaatgttaaatctgaaaatattagttatttaccaccattccaagatttaaattcctcaatcgataataataataataataataataataataataataataataataacaatgatactactactaacacagctactaatataatatcaaattctgatatttctaatgaaaaaagttcaatctcatcaagtattaatcaaccaccaacaaaaattcaacctccatataataattatccaactcaaccacaatatcaatatactattcaaactcaaccacaacaatcacaatatcaaccacaatatcaatatcaatatcatggatcaccaactccattaccaccacccccaccacaacaataccaatatcaaccaccattattaactcaacaatcatcacaagcaccacaagcaccaccaccaccgccacaacagcaacaatattatagaacaagtgatcagttaccaattcaagcaccacatcatttatcacaggtacaatcacaaccacatggtggttattatactgatggttataataatgtaagctatcatttaattcctactaatgatcaaatagaaattaatagaggtttaaagagatcatatgatagtaatggtaataatggaaataataataataattatcatagttataataatcctaatattaataaacaaaatgcaattgccggagttatttataattcaagtgcagttttcaaaagattaaaaccatgtattaatgaagagaaaagtgaaaatttaaaacattatgaaactaatagaacacaaggtagaccatttagtagaaatttaagtggtagatttattttacatgaaaatttgaaaagtttacttaatcaagttgataaaagaagcaataataaatttttagtttatgattttaaaaataataataaaagaaattataatacgattaatcgtaataatccaattaatgaaattttaatcgaaaatttgaaatcatgtattaataataataatagtaacgatttaacaaataatagaatgaatataattaatgaaaattttaatgaaatggaaattaaagttgatgaagttaataattttcttaattgttcaaatgatgaaatacttttaattgatggatataaggaaaaattcaatcaaaagcaaattatgattaattataaatggaaaaaggataataaaattaccaatagtaataataataataagaaagaagaagatgatgatgaatatgatgaatatgaggttaaagatgaagaaaatgttgaaattagtaaaggtgaaaattttcatttattaatcaagaaaaattttaaattaaacgaatatgttttcgttaaaacaattagagataataatggacatatacttaaattagagaccgttaaaccgccaattaataaatatggtaaattagaatatacgtccgaatggcttaaacgtagaatttgttatccaagatataaaggtggtatgaatttccatattttgaaaagtaatttcaattttgtactttataatgatttaaagatgcttttatgggatattaaggaagaaataatcattgataatagtgaagaaaaagaaaacggaagaaggagtaatgataataatagtaatagtaataaaatgaatgatagggatgttattaaagaagagaagaaaattaataataataaaaatggggataataataataatacaggcacagataaaatcaaatccatcattaaaatgaataaaccagttgtagataatgaaattaaggataaattgtttaaaaacaggatactttacattcaaatgttcaatttatgataatttatgataaaataaatctttaatagaacatttctcttttaggcagcatttcaagatccaatccgcgatttctaagattcgggtaattaattaataactctattttattcaactgtttattcatccgttttgctcagatctttctcttattctcattctatatcttatatatctctctctctgggaatgttaattgtataatataaataaaaataaaaatactataaagtctaatataaaaaccatctaacattgtataataggaatcgatgccctctttctcctcatagggtcttccccagccgatcgtccacagagattacttctttgggaagtattttaaaacacccgagctacatcggagttaaagttaacgtattcatttcatttcatttcatttcatttcatttcatttcttaaatggattaattgaagcattgtacgatgatttatttaatttttccctatattcattaaccatttcatcaattttatcatcatctaactcaggattatcttcttcaattttatctctaaattccattattttaatctcatttcgtttacgtatttcatgtttaattaactctttatcattttcaataagttgtttattattactagtgtttcttttaatatctttttcaactttcccccttttaatagtatttaattgtctttgtttatacttcttaccttcattctctccttgtttactaactctaatatcacctaaatttctttgaatatatcccgatgttgatgatcccttagctgatttaagtccaataccattatacgacattcctagatgtacttatacttatactaattattattatcacagagaaaaaaccccaataacatgacatcaaattattcggtaaactttttttttaagtttcttagtttttgtcttttcgcggagtacctttacggtggcaaatcagttactaatgcaagatactttctttgtccattattatctttcttttgatatggtatgtctcaacattcaatcagtaagttcttctctaatgtaaagaaggagaaggaattatctaatgatgtaatcttagattgtaataatcctcataccaataccaatgttaatgttgatttaaaacctaaaataactaaaagaaaggcaaataatactgaaaaatcaacaaaattgacaaattctaataaaaaattaaagagtaatttaacagaatttgaaaagcaaatactattatttaaattaaatcatttaaataaattattacttattcaaaatggttatagatataaatttttcggtaatgatgctttaattgcttcaaaaattttaaatattaaattaactaatggtaaattatcttatgatttaaataatccttcaaaaaatgattatctttattcaacttttgcttctgcttcaattccaattgaaagattattaattcatgttagaagattaattaataaaggttatattgttggaattgttgatcaaattgaaactgctgctatacgtgatggtaatggtgattttaatgaagatgatgatactttaactactaaaccaactaaatctaaaatttttgaaagaaagttaactaatatctattcacctggtacttttataaatgatgatgatttagaaaattcagttaactggtaaatcaattattttcattcaatgaatcaattaataattatatatcaatagtaagtgttaatgttttcacttcaaatatagtttatgatgaatttaatgataattttaatagaagtgaattagaattgagattatatcatttagaaccaattgaaattaaaactataggtaacaatatatcatctgagactataaattgtattaaaaatttccaaaaatttaatagcaatactagtcataataatagcaatatatcatacaatcatatacaatcatcatcatcatcatccttcaaaattatttggtgatataatatcagaattccaagaaaatgatttaaataatgaaattatttcatttttatcaaatcttcaattaccacttattgaatgcttttatgagcaattccaatacttgaaagaatttaaactctcttcatcatttgaatttttggaaaattataaaaattttagtgatatagataataatataattttggattcttcagttttgaaaaatttagaaattttcaataatttaacaacaggtagtgaaagaggtacattatttgaaatattaaataatacattgactaaatttggtcaaagagttttgaaaaattggatttatagacctttaattaataaaaatttaattattgaaagatatgatgcaattgattttatgataaagaaatctaattctttacaaattgaaagagttgtcaacttgttgaaaaactgtcctgatttagaattaatacattcaagaattcattataacaaatcaaataggagagaagtttatattttcttaaggaagattattgatatactgaaaatgtttcaaaatgtaaatgatcaattattttcacaagatattttcaattcggatttactctataatttctatcatgattttaagaaattttcagtggatgaatttgataatattaataatttattagatatgatatattcacctgcggcaatggatttgaaatcatcaaataatattaccgactatttcaatgagaattttttcaaatatgatgaaatacaaacatcaaatgataaaattcaaaatgtttataatgaactagatgaagaacttttaaacataagagaaataactaaaaataaaggattgaagtatttaaagataaataatgaaccatatcttattgaaattagaaaatccaacatcaatatcattcctaatgattggattagaattagtgcaactgctaactgtattagattcagaagtcctcaaaccattaaactctataaaaaattaaaatattatgaagagttacataaacaattatgcaatagattatttgaagaattcattaataagattaaaacttatcattatcaaatttcaaagttaattaataaattaggtatgtttgatgcacttttttcactttcaattgcatcatcaaataataattataataaaccaaatctagttgatataccaataataaaactggaaaattcaagaaacccgatatctgaatatttgctgaaacagaaaacggttagtatcttcaatcaaaacagtataaagtcatcaacatatattgagaatgattttaatttaaacacagacaactttaataaaaacaataataagaacaccaataataaaatagcattaataacgggtccaaatatgggtgggaaatcatcatttatgagacaagttggattaattacaattatgtctcaaattggttcttttattccatgtgataaaaattctatattaggtattttcaataatatttgtattagaattggttcaaatgatgatattttccagggtaaatcaacatttcaaattgaattaatggaatgtaagaaaattttagatatcgttttaaataatgatcaaaataataaaaattctttaattttaattgatgaattaggtcgtggtacatcaacaactgatggattaagtatcgcatggtcagttttagattattttattaataattttaataataatattgcagtattatttataacacatttcaaacaattagagaaatttgaaaatttaacaaatggtatcgttaaaaattattttatgggttataaattaattaatgaaaatgatttaatgtttacatataaattaacacctggtagttcaaatggttcatatggtatctattgtgctaaattatctggattacctgagattattgttaatagatccaatgaaatttccaataagatggaatcaaaggacattttaaatgaacttaaaaaagttaaaaaattaattaacactaaagaaatgtataaattacataattttacagaaagtttatagaaatatttatagatagattaatatattattacattttaagaaattttcttgtaattgtttcaggttgtacagtataagttatatcacctaaatctgaaccatcaaatttcattacttgagaatcatcatcatgaattatactaattgaattaaaatttttaaatggatcatcaacatcaccagttttaacagttgaattactatttttccttttacttctaagtgtacccattgaagaattattactttgttttttaatattttgattaatatttttcttctttttattattaattacaggtatcattggaggtttttgatttcttaataaagcccattgaatatttttaaaaaatggttgagctttaatttctgatgcaccagaatgtgaacctaatctcttattttcatcttaattaataattttttaattaaatttttacaattatttgaaatttgattataatcagggaatgttatatcaatttttaaaatatttgaaaatgtttgatttctagttgatcctttaaatggcgttataccaaataacatttcataaatgaaaatacctaaagtccaccaatcaactgatgatgtatgacctttaccccaaataacttcaggtgcaatatattcctctgtaccaacaaatgaattagttctaaatccattaatacaagcatttgtatctaattgtggtaaatttgttaaacttttattagttgaaataaattcaggatttgcagtatttaatgattgttttgataaatcaaaatcacttaacattatatgacctgattgatgtaataaaatattttcaggttttaaatctctataaataaaacccattaaatgtaaatattctaaagctgcaataacttcacaagcataaaattttgcatcattttcattaatacatttcatctttcgtgtttgtaatgctttaaaaaattctccacccatacaaaattccatacataaatataagtgatcatcactttgaaatgaatgatataatggtacaataaatggatgatttgcagttgataaaatttcttgttcagctaaaactcttttaatctttttacgttcaatcatttcctttttatttaaaattttcattgcatataatttcattgtttctttctctctaactaaataaactttaccaacatctcccttacctaataattttaatttttcaaatgattgtggtccaacttgaatatcagaaattttaattgaattacttgaataatttctttttgttaatgctggtgatattttagtaattttaatttcacctatatgacttgtcagtgaatcaatattattattattgttattattattattcagactattattattatcatttaaatgattattactatggctatctgcaaaagctcttaaacttaatggagcagatgcaacttttcttaaccttttaggtaagaaacctctatgttcagtttcatgttgttcctttaaaggtttcaattcatctctaacttcatcattaacatcatgttgattggtgttgatattattagctgtgttatctttattatctttcttattatcattattagtagttgatattttcgttattaatttcagatttttcattcttttcaattttttcaacttttttatcattaatttcatttgttgcaatttcatgttgaagttgatcagttaaatctaattcatcaattgtatcatcatgtttattaacattatttgaatttttcaaatgtgaaggacttgaaggagctctaattctcctaaactttttgcattaatgaaggtgtaaaatcatcatttggattattgttattatttatatcatcattgagattattactattgttattattatttatatcatcattatgattatgatcagtaatatcattattatcaggttgattatcatttgaattcagtatttcattatcaattaaatcatcgtgagctgaaaatttaaacaaatttctaattttagttaatcttcgaggtcttacaaattcatcatttgaagtatcatcatgatcatcctttgaaggttcagtatgtgccgtattggtgatattattattattattattattattattattatcagtaaatgaaaagtagtctaaatttttgatgttattatcattatttaaagttgttgaaggagtatcataaacagtaccttttgattcagggggagtttgtaaaaatggtggtatttcctgtagttggagtaattttattgtctattatgttattacttgtagtagtagtagtagtagtagtattattattattattattgttattgttatcagaaccaaattgaaataatctaccaatagataatttccttgaatttgatctggatcttgaagatttttgttttattgttgatggttgttcaaaattattcaaactagctacttcatcaagttcttgatcattgatattgatattattatgcatatgctttggagatgattttaaatccgatatattagtattattattattattattatctgtaaatttcggcatcagaatatgttaaataaattttatggaggaaatggaaagtacaaggtggaacaaaaatacaataagtaaggaatgaggggtataatgaagtggaatattataatggaatatgcaagtctagttgagtatcagcctttgaaagaagagagacgttcaagagaaagaagaagaagaatatacctttcaaacttagagaaagataacatgatcaacaatgcaaatttcatagtggtgaaaaatttaaattttttccaggttttcacatagtaaaatttacagaacaagtggattatatgattatgattatatggttatttatatagagttatgtagagttatgtactagtttagtagagtactgatatcatttagcaagatgtggaggaagtaagaaacttgcaataccatccttaatatagtaaacatgttgacaattatcacatatcattttaccttcaataatttgagtttctaataagagtgaatgtaaatctttaagtaaaacttcatttatatcatctaaggaaggtttttgaggaggtattgcattattacctaattgtgatgcaactttaacaagagctgaccaatctaatctctctaacattgaaattataaattcttcattaaattcttgttcctctaattgtaatttacaatcttggaaatttaatgggaatgaaccttcagtaccatcacatgatttaactgcacatcgcacaaaattacttgttataaacttcattgtttcctatactggtatatacatttacaagaaagagaataaaatataagattatggaaataaaccaagggaaaaatcaaaaataattttttcttcacgcattaagtcgaactgccacggtgaaccttccttggtgaaggatctatttaccattttaacgtgttctggggcgtattgtacgtccaaccgataaagatagagtgcatttgaaaacactttatgggcttcatgtattagtttcgtcagtgttttcatatgaaggaatataacccatataatcacaagctttttcaataatacgtttattatcatcagtaagttctactttcggtggtaaattaattaagttataataatatgcttttaaagcatcactatgaacgtattcatttggaattgatgcaatagcagctgttaaatcatcaccataatccatatcaaatggactgtagtatttattatcaataattgttttctctcttgatagttcagctattttatccttaattaattgtttaaatttatctaacccacagttagacttcacagctaaaactgggagtgaagagacaatattttcgtaatatgttgatctatcattttcatcaattttagaaacatatgctaaatatattttagcatttgcaatagctgtatataataaagtttcaaaattactaacttcaattctaactctacctttttttccagataaattcccaaattgttgaaatatttttagtgtacatggtcttaacttgtaatcaaatatagtcaaatcttgtaaaccgtaatattcaaaagactcaaatttagacgttgtaaatatttgtataataaaatgaatttaacatattacacgtataatacatttaaacttttgttcatttacttgtccttgactatgaaaaaatggacccggataagtaagaattagcgttgtttcaacgatacgggaaaccaaatcagtatctaaagtgaaatatctagttaccgtttcacatggagccaaacataattgagacaaacataattgagtgagtaatgctttgttatatggagccattaatgattgaatatactctatagaaagaaagacatatagataaagataatataaagtccaatttatgcagcacaatgtaattaaaatagtgcttttcctcactacttataattactgttgtaatctctttgttagtaaaccgagttcttttctagcaccaatactctttaattcatcaaatactctatatcgtatactagattcttttaatgtgcctattatatcatctgaattgttcattaattcaatgaatgaagtcttagtttgtttattaactgccaatattttaataacttgtaaaaatctattgatatcagttaaatattgtttaagccatttagatatattaattaatttatgtaacggtacagtagttgatatatttgaattagtattctttttagatttttcatatcgacttataattttctgtctaatagtcagtgttttgtattcagttggtgaatgtgaaattaataatcgtcgtaaaagtatcatttcttgtgaatataattgtgcttgatgtaatttattgaaaaatgtatcagttattttattaacactctctcgttgttgaattgttgtttctattggcgctgaatttgtgtttaatttgatgatttcttccattatattgttgatagtattcatattattatgggtataaatattatttgaattaatcttagcagtaatgttgtttaaggataaatcaaattctgaaactattttagcttgggatggtataaaatccaatttagtaatttcttcaattttattagtattttctttattcttactcttatattcactaattctattatcatatttatcatatttaccacttattatatctaagaaattaatattcttaataattaatccattatttgcaacatcaaatgatgattcagttaatgtatcatcatggaaaacttcaaccttagttgtatacatttgaataattggaggtaataacatgaaaaatgcaagatgtgaagtgtatgaaaacaattttaattcatcatatgtattccatttcctttgtctgaggtgattttatattaactcttttattaaaacttaaactaaaatttaaattatgaaatgatcttttaaatgaaaatttattaaatgatgatttgaatgatgatgtatatatcgatctaggtttgaacccattccatgagttcctaaaggcacccatgtatgacattatagaaaggttgtctataagaaaaagatagaggttactaataagatataaaatgtggtgtgtttattatattaccataataatttttactcgctgagttaacatgtaaattttcatgtaagcttaatcttcactttaattggctgatagtatattgattatagattatacaatatcacactatgttaggactttatttgacagcagagcttaacaatgttacagatttaactacagaggattcagtcaatgaaccatttgaatatttcttcaaattagaatgtacaaaatgtcatgaagtacatgataaattagtttcagttaatttatacgagaaacatgaaattagtggttcaagaggtgaagcaagttatgttagttcatgtacattctgtaatagtaaatccaatttaaatattcaaataccgaaacattttaatggttatactaatgaagataatggtaaatcagttaaaatacttgaaattgattcaaggggttatgaaattgttgaatttattgcacaatcaccatttaaatgtaaaggattaaatagtgaaactgttttcgataagatagatttatcagaaaatgaatggtatgattatgatgataatgcaggtgaagaaacttcaattactgatataaaatgggagattaaataataataatactttcaattctattttctattctaattcatttttttaaaagttttataagtttttatatttattatactttatttatttaacatatattaattataataataatatttaataatatttaaaaatttaatttagaaagcaagtttagtaaagaaccatttatttttaccagcttgatgtctttcttcaaaaactttcttaacggttttctttgcatcttctctttgagatggttcatttaatgattctgcggtaacagctgccttaaatggttcaacatcaaatgaatatctagttggcattaaatgattataattaactaatttaacaaatggcttaactttagtcttctttgcaattttctttgcacccatacctttagtaacttttaatggagctctttcaacacctgcaacaattgcatgtgggaaagggttagcctttgttccttcatcaaattgtttaacaataacaacttttttaccagcatttctacctctaacaatgactgcaactttaccagatttaatgaatttagccatttttgtgtatattaaattgaactagttatagatgggtaaattaaaaaggatttaataaaatttaacagaaatatattttaaacaagtaaatattgaaaagtaatgaaaaatactataataattaattgataatagtaagtgaataatttcagtagtaaaaacttcacctgagggaaactggaaaattttcagtctctgagaaagtggcgaggggagcgctggtgggggaattttaattttactggggggtctttaatgggtcactggaggggaccaattcgctgcttttttttttctttttttcgctcgtttgggaaaaaagggctggaggtttagccctatggcaggacacgtgacacggggtgctaggagtttattatagttagttatagttatatgatgattattttgtgatcgattaataagtaaaatacacaattatttaaacctactacgtgctaggaacttggaattgctactattgatcttcttatcatctgtgataccaactcctgcattaacacttgccatagataccgctttattaacagctgcattaatcattggattactgtaaatcttcttagttgtcttcttcatactactctgtttattactactattattggtatttgctttgttatgtaaattggtatttgaattacttttagtatgacgggatggaattggtggtggtgttgcaattgatgtatttgtagatgtagatgttgaattacctgtagatattggtgattgtttaacttgtttaatattagaatctgtattagttctcaaagttgtaaaaaatgtaccttgtttcacattattattattattagtagtagtagtagtagtagtagatacttctgattctttatttactggaatcttaacagttgccaatgttgcagctgtaaatgcaatttcatcaacattatcatttccattactgtcatttgatgtaataaattctttaaatttacgatctttttccataattcttgaatttgctaatacacttgtccattgtttaacctctgatttttcaacttgtaaaattattgaaatagaatttgaaataattgaaaataaaccttcagtaatattaatttttttatcatttaaaacttcaacaaaattaattaaattacttgttaaatcaatttcacttgtaatttcatatttatttaaattatctttaactccacgattttcctttaataatattgctcttccaaatgttgtaattattaatgtccttgtataaaatttagtatctaatttaggtaaattagcatttgcaggttgtttaactgtgaaaaaattcctaaatttattggaaactgataaatcattttcattctcattatcattatttgtattatcatcatacaattcattacctattatatatttattaatatcaatatcatacagtttaatactttcactttcatcatttgaaaataaattaatttgtgatattttatccttattcttataacctaatggagattcaattataccacctttatattttttttcaaaattatgtattaaatcaattgaaacttcaacaattccaactttcattatcctttcatcatgattcttaataaatttaataaattttaaatcaagtgttgacatatttggtatttcattacttttcttattaatattggaattattacgtgatttactaccattaccacttaaatgattaatattagaattatttcttgatgcaatcttagtatttaacaccggtcttggaatattagtaccaggaatcacatcaattgaactattagaggtatttggagcttgttgggtattattattattattattgatattactgttactatgttgttgtcttgatttaactattttatcagcaatttgttgttgtgagtctaattttatttgataaattgaattatcagattcacttcttgatgatgttggtaatggtggcttagatttaagattaccaccatataatgcagtcgatgctgcactactagccgaacgtttcttcttttgtataacagctgagtttttcatagctggtgaagaattattgttattattattcttatcattatttggtgtaccaggtgtaccaggtgtacttggtgttgaaattgatctttgcttcagtggtttaatattatttgttgaattctttatatcactagatgttttattccttttaacatatttaatcttactaccggtattttgatattgtaattctaattcgggtattggtttcattgaaattgcacttattttataagcactcagtttaggtggatttttttcccaaatttcatcttcgttattccaattaatatctttaaaccaataatgtctcttaatttcattaattgataatctatcatttggatttaaaattaataatcttttaattaaatctctaataacaattgggaaaccagctgtaaatgcatattgtaatttttgaattttttgaaatgttaaatattcattcgttgccttaaatggtggtttacctgcaatcatttgataaattatacaacctaatgaccaaatatcagcagatttaccacaatatttattaattaataattcaggtgaaacatattcagctgtaccaacaaatgaatttgctcttgtatctgatggataattaccagttttatcatctttatctaataattttgcagtaccaaaatcagttatttgtaatttcaaatttttatcaattaaaatattttcaggttttaaatctctatgaattacaccatttaaatgcataaaattaattgcatcaattaattgaattgaataatattttgttgattcttcattcattgtaccaaattttttgattaatgataataattctccattttctgcataatctaaaacaaaataaagactttgactatcttgaaatgtaaaatgtaatccaattataccatttcttttacctaatctatttaaggtatttttttcaatattaacatatttaacttttttctccttgattatatgtcttttattgagtatcttaattgcatatttattattagtattaatatcagttgctaaaaccacagttgaatatgaaccttcacctaattctttacctaatttaaaatctttgatacctttacgaataactttagagttagttataataattgcatcatttgatgtgttggtattggaattactaacattactaatatttgaattattaattttcagttgtcttaatctttcaacttcttcatcatttaagtcatcatcagaatcactttcatcggaatctaattcttcatctgcttgattatcattcatttgagtataatataatgcattattagtatttgaatcttcctccagacttacttcatcattatcattgatagtatcatcattattataactatagttataactgttattattgttagataatggatcaactatatcaaaatgatgattatttgaggttggagttttcaataaattattattagttggagttgttggagattggaaagttggattatattcattaaattttggagttttaataaataattgtgatgtatcattattgttggtgttttgtttattattattgttattattattatttacgtaaataccttggaaatgatctataggagttgggattggagggatctgatttttattgaaataataattattattagcgttgttcacattgttcatattgttcatattgttgttattattgactaaacgatgaatgttatcctcaacagagggatcaactgattgttcataaacagcagcacttgaattcattgattgagcgtttgccgatacaattgaattatttggagaatctaaataatcatcatacagatcagagtaatcttcaatttctgcagacattgaaggatctagagatgaataagtaaacttttgatcttgaaaattattagtagattgatcctgatatggatgatttgacatgaaattgtgatatgtagtaaattagaaaacaaaaaagtattaatgcaatttatatatgatatgaaaatgacgagaaaagagagtggagaatagtcaatgaataacgtaaatacaaggagtgtattgtattatagataagaataggtatatgaatatcgataaaacgataagaaagcatcaattggaaagtaaagtggtgatgatgcaaaggaagaaagcgaatttccaagggagtgagaaaattgaatggcaaatcacttatagtatgggggagaatgggcagaaagtgttgtgttttgttatttgcttttgaggagtataggttgtttattgattatacaacatgagtcgtatattggttgatagtggtgatgtagagtcttatggaatgtctgtagttgacatagataaagaaggtgctggtattggtagtaattgtaatactattaagaaggatagcaataataataataataataataataataataataaactggggttttataggaaattaaagaatcgtatcaccaaaaggtttcgtagagataataatagtaataatgatatcaatagtggtagtaccaatagttataatattgataatagtaatgaaagcactacaggatttagtggtaatagtagtatgtctaatgatattaatgatagcaatataataattaccaactatagtacaagaatacgtggtagattatattattataacaatggacaatattttgataataatcttaatgaatatcaactgtcaatacctagaacaagggatagtaatatgacaatgattgtatcacctaattggaatacaataccaatacgtattgatccaccagtgacacttgaacaggaatcagttaatagattatcaactacaacaagggaacatccaccatcattatttgcagatgttggatcctcatcattaaatcttagtgatgaatcatcaacggaggattcttctacacaattaacatcttcatcaacggaagataattcatcaccctctccatcatcagatgctgtatcatcaatggaatttgaggatggatcatttgaggaaggatttacagaaacagttacaggattaacgagaaccatcacccaggcagccacccttgttgcacccaataccaccaccactagatccacccaatcaccatcactatcactatcaccatcatcatcatcatacaactcactgctacaatcaccagaatacctctacaagagaactcaaagtgcctgaaatcaatatctattaggtaagcccttagtaaatttttaagaaaaccgcgtttttcttagttaactcctttcactatgggcattttttacttttttgtattgttgacgtggtgctgtgattataagctatattacagggtgtgtttcatattggaatcatattataatattattataattatctttttgtccacattatacatcaatcttcaacatcatgacaaataccatgaaaatacatacaacggtccatcgtaaaagtggttggattaatgttaaagatgatggaattatctcatttagatggccaaggaaatatctggttttaactgaaaatagtttagatttctttaaatcagatgataaacatgaattatggttaagaatacctctattacatattctcaattgttttagaaatcaaatgaaggataattgttttgaaattcaatttaaaggtaataaatcaatttatatatcaacaaaatctgataaagaaatgaattcatggattgatttaattttaactaaatgtccaagagaaggtttttcgaaacctttaaaagttactcatgaggcaaaagttagttatgatgcttcaaatggtacttttaaagttaaaggtataccccctgaatggttagctttattaaaaggttcaaatataacttatgaagattttgcagctgatccatcagctgttattgatgttcttaatacttatagtgaaatggttagtcccgaattaagtcattcaaataaatttactaacaaattaaaatcaaatttaaaatctcccctatcgtcattaaatacacaacaacaacaacaatcatcatcattatctaattcatctccaccatcatcatctggtgctacatcttcaaatttattaaatgaaataacaaaaccttattctgataaatttttacaacctcgaagagctcctccagttccaaataaagttaataatcttaatgtttcatcaaataatagtaattttgtaccaactagaaaagcaccccaaatacctaatcaaaataacaataacaataattcttcacaacttaataaaccatcatcttcaatacctccaagcatcccacctccactaccaaattcaaataatttacctgatttaaaaccattaaaattatcaaatttgaaaattaacacaaataatgatataaattattccaattcaaatccaagctctgcatcttctaatggatcaaataaaaataatattgaattacctttgcgtcaagcaccaactcaaccacgaaaaccaaatcaagttctacaatcaaattataaacaaaacataaaccaaaatcaaaatcaaaatcaaaattataatccttatcaacaaatagatactattccaaagagagctgcaccaacaaaacctcaattaccggctcaaaataattaccatcaacaaccacaacatcaacaacagaaataccaacaacaactcccactacaacatcatcaacaacaacaacaaaagcaaccacaacaaaaacaatatcaacaacaaccaccacagaatcatgcacaaatgagtgcacaagctaaattaatgggtaaatctaataacaataatttaagagcacctgaaagaccaactgataagagaatatcaacaatgacagagagtcaaataatggcaaaacttaggagtgttgtcattaatgcaaatccggcaccatatttccaaatattatctaaagcaggtcaaggtgcaagtggagaagttttcttagctaaaagtaaaaaaatgaatggacaatgtattgcaattaagcaaattgatttaagtaaacaaagcaggaaagaattgattgttaatgaaattttagttatgagagattcacaacatccaaatattgttaattttattgaagcatatttgaatggtataaatgatttatgggttataatggaatatatggaaggtggttcattaactgatataattgataataataataataagattacagaggaacaaattgcatgtatttgttatgagacaacaaagggattacaacatttacataggaagaattttattcatagagatattaaatcagataatgttttattagataaatatggtaatgttaagataactgattttggattttgtgctaaattaactaatgaaaaatccaagagagcaacaatggttggtacaccatattggatggcaccagaagttgttagacaaaaggaatatgatgaaaaagttgatatttggtcattaggtataatgacaattgaaatgattgaaggagaaccaccatatttaaatgaggaaccattaaaggcattatatttaattgcatcaaatgggactccaacattgaaaaatccacaaaatttaagtaatgaaataatggaatttttaacagtttgtctttgtgttgaagttaaatttagggcaagtacagattcattattagaacataaattttttaaaaaggcatgtcatacatcacaattagcaaatttattaacatttaatagtaaatagtatagatttatagatttatagattaataattcattcagtaattaaaccattttcataatcaattatgtaagagaaataattttttgataatataccattttcattaccaggagttaaataaaccccattatttgaacgatataatttaatttcatttgagttttgttttaataattgaatatttattataattataatttcacaactatttcttatacctgaaattgcattattattagataatgtagttaatgataaatttgaatctagatttaaattatttattatattattaaattttaaaggtattttatcagttaaatggatatgatttcttaacattttcgataacccaccagaatttaaaattaatggtaatttatccctataagtaccatgaattaaaacatttggccaattatccatatcattattattatctagtaatatcatattatgagtcataccaactgattctatactatgaccttgtaatgcagcaattaataataatccattattaggatcttcctttaagatgaatcttttcttagaattattattaacaattctaattatatcatcaattgtagccttatttgatttaataaatttatgatttaaaacttgattaattggtatgaaaccattagaatcaattgaaagaccatctttcaaagcatgatgtcttaataatttagctaatgctttaccaattataatatctctcttattattttccattgtatgatgatctgtataacaataataataatctactgataagaaaccctgtgagtgaaaaatagaaataaaaatgaaaatacgtcatcaaaataaaaaataaaaacacagtcggagaaaaaaccgttgaatctccgacttccgtaatcccgtgttcctacgaacaatcccttcgtagaaacacggacaggaaaaggataaactcccccaccggacaaatacgttccacctattgagagaattattagaacaacaaccaccgtctacttccccccgtaattatacgtaatcttccccccgcctgtctaactattctctcaccttgtctctccactccgtatgtccttattattttattaggtgccttaatcggggatctcgtgttggtatcctatgggaacttacaaggtttttatctataaatacctctatgtttcccattttgatagtatctggatcaggatgttaataatttagaacagttttatattccttttttaataaacatacatacataaaatgactatagatccttgttgtgaagttactaaaacaccagtcggtgaagatgctaaaattaaagttgctcatgcaactagattatctgcaaatggtccaattgaatgtgatttatcaggtttccatttacttaattctcctcttttcaataaaggtaccgcctttacattagaggaaagaaaagcttttgaattagatggtttattacctcctgtagttaatactttagatgaacaagttcaaagagcttataatcaattacattatttgaaaactttattagctaaaaatgatttttgtacttcaatgagacaacaaaataaagttttatattataaattagttcaagaacatattcgtgaattaattccaattgtttatactccaactgaaggtgatgcaattatcgcttatagtgatagatttagaaaacctgaaggttgtttccttgatattacaaaacaagatgaaatcgattcaagattagaaaaattcggtaatgataaagatattgattatatagttatatcagattctgaaggtattttaggtattggtgatcaaggtgttggtggtattagaattacaattgcaaaagctgctttaatgactttatgtggtggtttacatccaggtagaacaatgtcagtagttttagatgttggtactaataataaaactttattagaaaatgatttatatcttggtcttaaaatgccaagagttagaggtaaacaatatgatgaatttgttgataaagcaatgaatgcaatgaagaaaagattcccaaatgctgttgttcattttgaagattttggtgttacaactgctaaaccagttttagatagatatagaaatgttttaccttgttttaatgatgatattcaaggtactggtgctgttgttatggcatcaattactgctgctttaaatttaactaatagagatttattagattgtaaaatcttaatttatggtgcaggttctgcaggtttaggtattgcagatcaagttgttaatcatatggttattcatggtgcaacaaaggatgaggcaagatctaaaattttctgtatggatagatatggtttaattttaaaaggtatggatactaattctcctgctcaagaagcttatgctcatgatccaaaagattgggaaaatattgatactaaaaatttaattgaagttgttaaaaatgttaaaccaacaactttggttggttgttcaactcaagctggtgcatttaatgaaaaagttatcaaagaaatgtataaacataatccaagaccaatgattttcccattatcaaatccaactagattacatgaatgtttcccagaggatgcacttaaatggactgattttaatgcattagttgcaactggttcaccattccctccagttgatggtcatgttataagtgaaaataataattgttttacattcccaggtattggtttaggtgcagttttatcaagagcaactgaaatttctgatagtatgatatctgcagctgttgatgaattagcttcattatcacctgcaaagataaatccaaaatcgggtttattacctccaattgaagaaattcaagaaacttctgctcgtgttgcaactgcacttattttacaatctataaaggaaggtcattgtcgtgttgaaaatgaagaatctcctgatggtggtaaagttcatgttccacgtgattttgaagaatgtttagcttgggttaaagaacaaatgtggagaccagtttatagaccaatgatcaaagttaaacattctaaaaaaattcatactcatcaatattaaatttaatatttactatctattctctgtttttctatctatctaatattctattctttgtatcataatcataatcataattaatatcataataatctctcttatcgtgagaacttcccaataaggcaactggatgcggttatcttacagactcgttatgtttccacaaatttcatgatttttattttcatgcttctaaatttcccccaacttattactaaaccactcttcttcaagacaacccacaatgagtatgaaattaccaacaattgcaatagttaattctataccaccactccctggtacttcaacaactataaaattatcacttcaatcaacaagaccattacttgatgaaatccttcaaaattctcaattatctccacctacacataaatcgattactgaagtacgtaatgtattgaataaacctaatgaaaagccaattaaattgattaaaagtaaccgtggttctaaattggaaacattccccgttattgcttgtgttagttatgatacgattaataattcgtttggtaatgttggtgtaattgtggaaatattgaatattaatttatcgacacagaattgcgtgttaactattcgtggtaaggaacgtattggttttgatgaatctttgaaaatggtatcaaattataatggaaatgtggaatatattggaagtcataattatgagatttttaagattactgatgatgttaatactgatggagtagttgaaaatctattggaaaatttacaattgataaaatcatatgttaatgattttactaaagttgatgaaccacagtttaaaagtattttacaaaaactaaatccattatctgagataatgtacattcaactttctgattcatcaaaaccccttcaatttcaaaacttcgagaaagacttgaacaaatcattaaataccacattattattgaaatattgtgatttatacgttactttatttccatttacttataaacaacaattcaattacttaaattgcactgaaaattcatcaagaattgaaaattttaaacaatcattgtccttcgttaatgtattatttacaaaacacttgaatattgaattagtctatgaatcttggactcgtttaggtcgtcttaataatggtcaatacttacaatcaaaatttattgttaatcaatttcgtgcattacgagacttacttgaacttgttgaccctggtagtactaaggataaaaaaatccataatactacttctactaataaaaaatctaatatattcaatacatctcacacaaactaacacccataataataagaataatctcattgatgatgatgaagaagaagaaggatgatgaactaaagtctattaaagattttatttccaaacttgatacaattcacatttcaaaagatggtaaaactttactgatcaaagattataaaagattaaagaaaatgcagaaaactactgcagattatcaacaattacacaactattttgatatagttatggatttaccatgggaaagtgttgagcaatctaagtctaagaataatattgatctagagaaagcacaaaaaattttaaataatgatcattatggaatggattcggtaaaggaaagaatacttgaacatattgccattttgaaattaacgcaacaaagtgaaaatcctaaacctaattcaaaggcaccaattttattattgaatggaccacctggtgttggtaaaacatcacttgcaaaatcaattgctgaaagtttaaattgtgagtttcaaagagtttcattaggtggtataaatgattttgcagatattaaaggacatcgtagaacttatgttggttcatttcctggtttaattattcaatcattaagaaaatctaaaagtatgaaattagttatattacttgatgaaattgattcaatatcaaatagtaataatttaaagggtaatcctgaagctgcattattagaattattagatcctgaacagaatcataatttcactgatcattatattggattcccaattgatttatcaaatattatatttattggaacatgtaatgatcaatggagattaagtgaaccattaagggatagaatggaaatattagatttagatggttataattataaggagaaagttatgattggtaaaaagtatatttaccaagacagattattagaaatgaactgagaaaagatcaagttttaatcaatgatgaagttttagaacagattgcagttatgtatacacacgaggcaggtattagaaattttgaaagattaattgggaaaatttgtagaaagaaagcagttgaattattaattgaaaaaaatgggaaatattgttcaacggtgacaaaatcagatttaattaaatatcttggagtaccaataagtttcacagattctgaaaaatattcatcaactaattcattaattcaagatgattttggtatggttcatggattatcatataattctgatggatcaggatcactacttagatttgaaatggttggagttccaggaaatcaaaatatttcatgtactggtagtttaggatcagttttattagaaagttgtgaaattgctgaaacattagttgaacatttaattcaaactcatctatttattggatatgattctcaaaaattaattgatagactaaagaatacaaatgttcatatgcatgtacctgaaggttcaattaagaaagatggaccatcagctggtttaactatgacattatgttatttatcattaatacttgaaaaacccgttagtaatgaaattgcaatgacaggtgaaatcacattaactgcaaaggcattaccaattggtggattgaaggaaaaacttttaggagcaagtttatcaggtaaaattactaaagttattgtaccaagattaaatagaaatgatttaattaaagtatttgttgaatcaatacctgatcgtttagagtcaaagatattattaacaaagcttgtattagatgaggaacaatgtttattaaataaaaataaaaggtataagtttgataaaattgttgaaaattgggttaaggaagaatatggtgttgaaattaaatatgttgatgattttatgggtgtaattgaaacatgcatggaataatgaaattcaattagttcgtaaagaatccagagcacatttgtaataatataataatatataatgactatataacttataaataacttataaattatttagcatattgagcagtccattcacgagctgtttgaattgccttatcatgattatttttccattcatctgcaacttcattagctaatggatcatcaggatttggtgaacttaataaagcttgaattgataataaaattgtacgaatttgtaatgcaggactccaattattctttaaaacatcaagacaaattctacctaatctatcaatatttggatgataaatttttgttaaaaatctaaccattggtggtgccattggataatcatctggtaaaaaaagttctagtttgaaaactccattctcatatggtgaacctgatggtccatctaataaaacatcaaaataacgtaaattctcttcatgtggtgttgccgttattccaggaactggatcagatataagtctttcagtttcctataaaaaaatgtattgtaaacttaatgttagtatattttgaacttaataagtattttaaaaaaccttctacatactctaataattctcttcggtagggacgacatcctgattgggtgtatataagttgtataggtgtataatgagagaaagaagtgattgtcagaaaagaagatgatgatcattaatatcgtttagataaccagcgagtcttcaaattatacgttaacttaaagttatagttaccatgaatctttttatggaatttatcactatacatatttgattacaatacaaataatatgtccaagaaaagtgttggcggtagattcaatgtacttagtataggtcttgtctctgggtttcttattggactttatatgattaaagattatgaattagttaaatattcaccaccaaatcctgaaaattttgatgaagatggtaattggaaagagaaatcattcatcaaagtacgtgttgccaacggtgttgcaccattacaaaagaaacataaacctactgataatgaaggacaaggagaggtgcaaggggaagagcaaatagttgtacatgtatataggtatgatatagtttggatatacttttaaataaaaatgttttatagatgatatattaataatgataataaagtaatttacataggattttgatgattgtaaccttgattttgactttgattctgtatttgagtttgtagttgtgctttatttcttgcttcagcttgcattttagcttgaacatgtgcctgttgtgcctgcagttgagcttgtgataaattttgtgattgtaattgaccttgttgcatttgagcttgttgcatctgtgcttgttgtatctgtgctttcttctgcatttgcatataagttaatgcttgattttgtttcattgccattctttgttgattattcttttgatgttgtgatctaacagggaaataaatttgttcatttatattttcaacattcataactgcagctcttgcatacattttacctaatggattagtttgtaatcttggtaataaattagttgcaaacatttctctcattcttaaatatcctgttctcattttaacaggtatacaaacatttctctctaatgggaatggaatacttcgacgaacacctgctaaaacttgtctagtttcctcttcatcatctaatgcaactgatgatccatgtaataaatcatcctttgcttgttgggctgcagctgcagctgcaccgattttagcttgatttttcctttgataagctgctaataattgatcatatggagctgaacgacctaaaactgcacgttttgcacccattgaatgtgttttacatgtaagggaacgtgcacaaaatcctccatttggtaatggcacaccacattgtctttcaacatcaacgggtcctttgtttttcgacttaacagttttgattttagtttctttctttttcttacctgatgttgtagaacttgttgaatcaattttaactttcttcttatcaggttcaacagaatctttcttatcattattagatttatcttttgttgcttttatcttaattttcaatttttccttttctgaacccttatttaatgatttatcctgttcttgtcctttatcttgtattttatcttccggtatttcaccctcttcagttaaatcctctgtatctgcttttctcttatatccaccttttttcccacttccgtttatatttcctgttccatttccatttccattcacagttccattcccatttttacgttcctttttatcgacttcaacagatggacttgaaaccatcatctaaatcaataacaacagcattattactattactaatattatttttatttttgttattattattctgattgtttaaattatcacaattttctaaatgttcaagtattttatcaactgaaatcgccgtaccacaactattacatattctataatttatacgatcatgtaaattactatcactcgtgttatttgtcgtgttattattattattattattagagtctatgaaggatccgaatcctctccaatttttgatatctggtattgtggcatcgttattcgatatttcctttatattagagatactcttattcaaatcactcccgagtgatttctctattagttcacgtgtggcgtatctactcattactcgtgtgggttagtttcaactgatagaagtaacagtacaggctgttggaaaaaatgtgtgaaattttaattaggtaatatcaacacaggtgataagatttaaattttaactataagttgtagtaaagctgtattaaaaaaacgtaatatcgagtgtaaataaatagaaaagagaaatgaaataggtaatgtaaacgtaaatgtaaggtaaaataaagcaaagtagagaaataggtagaaaaaagtacagtagaattataggttaaagcatttactcagtgtaaccaatcaattctttagccagttcaagtaatctatggctgagttcactctgtaatccataatgtaaactcaaaatatcataattaacactttcgttgttaccattattacgttgtccaacgtataatcttaatccacataataaattctcaagaatgtaatggtcatttttatcaaggacatctccatgttgataagaaatgaatgtatcttgttcaaatttaagattttcggttatactatcaatatcagtgtcatcttctttatcggtatttccagaaattgaaatattatcaaaattatcattaaattcatcatcattagaactattatcagaatctaacatatcagaatcgacaccttcttcaatttcatcttctaaatcattataattttcagtatcaatatcattattgttatcattttgattctcaatttccttttcatgttctaaaacaacaactaatgttctaaacgttgcaatcaatgccattaaagaaattgaatctgaacacataaattttcttgatttttcatttttcaaatatttgattaaactacgaccatattgataattattaatttcatactggtgtaaaataattgaacaaattaatgataatctattctcctctgaaataatttctaatttttttttaataaaatatgaagaattttgaactgataataaaatcttcaaaacttttgataaaactggcgtcgaacttcttaataaattcaataattcatcttccttcccattattggtttcagaatctgatttaatctttattaaattatcttcaacacttaataaaatcatcttcaaagtatcatccaagaatgagttattttttggatttaaaactgatttgaaaatcttacaacatttaatcaatttgatacattgaggtggtataaatgattcaattacttcaatatcattgatcaatttgagtgtatcctgttgaactattgaattaaattcagtattctcattaacaatatcacttaagaatttaaccattctagctctaatattctcaactgaccacaaaacaattgatagttcaaataaatttaatttatttgttggtgtattgaatcaaatattcataaattgaattatatgcgtgattttgtaaattatttgcagatccatataattcaattgcagttttctcactagatttagtttttgttaaagaaactaaaattttagaaatttggacattgatatttgttgaatttatgaaatttggatcaaatttgataaaatctattatatggaaattgatgtaattaatattattattgtttttattaagcatttcagaagtagtttgataagtttaataatgaactaattaaaaagtcaattcttgaattgaaacctaaaatataaccaataattgggaatctacgcatgaaaagttccaaaaggataattttgttaaacgtatgttcaattggattagttaaatttgaacccacaataatattttgatttaatttccaacttgaaacatcagatacatttaagattctaacataagcaaataaaatacctgaaaatgaagttggaaaagaagttaaatcaaatggaaaaacatcagcagcttgattagttgcatttctgatttggtttgaacttcgaatttaaattatgagtttgaggggataaaaaatttagtattgaagcaatagcggataactggaaagtttttgtatttttatttgtttccgaatttgttttatcaccttttctatcaaagaaatttgggaatgataagttgaagaagtaataaatacaagagaaaaaagtagcatattgaataaatatatttaatttttgtaataataatattggaattgcatttaatgaagaataattttcattggtattactgaaagaatttgataagtttgagcctattaaagctgccacaccaccaaccagtaattttgaaggtaggttgttattgttgttgttaatattattgttattattgttagcatatgggtatgaggtgaattgtcggtgatactcatgattgttatttatatcatgattgttcatattatatcatgattgttgttcatattacttatattatcattcgtagtattattattattattattattagtaccattattattattttgagtagcattataattattggtattttgagaacttgatctcgaaggaggattagttgaagctgaaactaatggaagaattgtttaagaaaggttgcattgttgttctataaccataactacttctactattattatctaaatcatttggaacagaatgatagactggaggttgtagattataattattagtaggatcataatatgaaggattgttaagggtatcattgtaattgttggaatagttggtattataatcagtataattattattttgattaaaggttgttgagttattattattagtaatattattgatatcataattattattataattaatagaatgattattatttggcataataatttgagacatttgaggttgatttggtaaattacttatgacttcaattggtaaattatgtaaatcattttgaggtttataaacataatttggatttgattgtaaaattctaatttcgtttattaataaatcattctttgattttaagtgtttaatatattctgttgcctttgataaaattgaagctttatttaattttgatgcaggtgttaaaccttctaattcatcaaaatttgttggactttcatcatctaaaattctaagggttggtacgacatttttcaattcaataaattttgagttaatatttgatctatattttttctcaacaatattatgagatctctttgggtgttgattgatagagatattattatctttaacattatctttactactactttctttatctttaatattaatattattatcttcattgttactatcattattattattaatttcaattttttcctgcttattaaccgattgaggagatatgggagaagatttaagaggagaatcagaccctgaagatgaaggggatagtatctgactgctcattgttgtgcatacaaagaagaaaaaggtacatttaacaatgaaaaatggatgagccaggtataaatcaaaaaagggcaacaaaaataaaataaaaaagagacaaaacccaccgtcccatcgactgcactcttattaaataaaaactcactctctttttttcttcttccactttctctaataagctattactattattaaattgttaaattatcgttactttgccttcaatttggttttatcttcttttagatctctttctattctcttttgatctttcacttctcttttagtacacacacccaactactatatatatcacactagcccatcatgtctatgaaaagaattaataaagaactccaggatattggtagagatcctccatctcaatgttctgcaggtccagttggtgatgatttatttcattggcaagcttcaattattggtccagctgattccccttatgcaggtggtgttttcttccttgcaattcatttcccaactgattaccctttcaaacctccaaagattcaatttgaaactaaaatttatcatccaaatattaattcaaatggtaatatatgtttagatattttaaaggaacaatggtcacctgctttaactatatcaaaagttttattatcaatttgttctcttttaactgatgctaatcctgatgatcctctagtacctgaaattgctcatatttataaaaatgatagagctaaatatgaagcaactgctaaagaatggactaaaaaatatgctatttaattttagtatcttcatccagtatttagtatttttataaaaatattttataaataaatctaatcaatattacttacttatcataatactctatactatacttcactatagtatactgtagtataccctcccaggtatagtatcgaccatccctctaaataccgcgattacccttaaataaccgttgattctatcttgacatgttttttttcttgtacaaatcttttacaaattaaactttcattttccttttccgtcccatatctctctacacaatggagaaaccaccaaagaagaaaccagcatttagaagaaattatattgcttgtctaaactgtagaacaagaaaagtcaaatgtgatttaggtagtgttgaaaatcctcatgatccaccttgtgctagatgtagaagagaacgtaaagaatgtgtattcgttgatccaaaaaaattatcaaatcatctacttgctcataatcaacggaaaaactttactaaataataataacaatagtgttaataatgttaataattaacaataattacaataataacaatactcctattcaaaataattcaacaaatactataaaaattaatccaatattaccactacctaatccttactttccattcaaagccaatcttattaaataataacaatactatcaacaataataataataacaatcctcaaaacattcaatccaattttcataaccctaatgaagagtatgattataatgatgatgattataatgatgattcaaattctttacattcatcatcaaaaactttaactagaatttcttcaaatcctttagatccttcatcaaatccttcaatgccatcagttaattcatcaattcaaagtttaactaataatgcaacaatgatttatttagctcatgttgcaggtaaagtatcacaaattgataataataaagaatcttttgttaaaaatttacatgctgaaagattatcaaaattagagaaatcaactcctataccgacatcttcttctctgtcaattagtaatactaatagtcaaaataattcaaatacaaatttaaataataataatacaaccagttcaaataatcaaacacctaattcagttgatgatactgaaccaatattagatagttttggtcatggtaattcacttaatccaatattaaataataatagatttacgatacctccattaacaacaactcaaagtatgagacaaaaaccttcaactaatttaaccgatattgaatatataatatcatcaaatgcttcagatgaaattaaatctcaatatattttaactgatatagaagcaactaaatcaattaaactatttttcattactttacatccattttatccctatataccgaaagatttaagagatccaaatattttagctaattatccaatcttattatgcgcattattggcaatttcagcaaggtatcatccattacctgaaaaaattggtgattgggataataatgataatgatcaaaatgaaatagataacaataaaaatgataataataataatgatgatgatgatgattcaaataataataaaaatttgaatgataggacatttatcagttcatgaacaattatggatttattgtcaaagattaatgagtatgactgtttggggtgaatcttcaagtagaagtgttggtactttattaacatttttactcttcactgaatggaatccaagagcaattcattttagatggggtgattatgcaaatagttcatatgatgattcattagctaataagaagattaaaataactaaaaatgttggtaaggataatactaataataataacaacaacaatagtaaatccaacaattcaagaaaatcatcagagatcaatcttggaaatgagtctcgtaacaatagtaataataataatacaaacaccgctcatcctcgtgaacatgatgaagaagaggaatttgttggattaagtgcaatgaagagaagtgaaattatgtcatttatgcttattggtacagcaactagattatcatttttattagatacagatccattaattttcattgcaactcatgtatcagaaattaatattgcagttggattaaataaaaaatcaatgttacaacaaacgttaagtgaagttgatgttaatgaaccattacttcaatttactttatatcaaaaggctaaaattgaattattacaatttttttcactttgttatgaaactttatatggtacaagaccgaaaatttattagtttagataaatatcaaactttggcaattttagatattttatcaccaatattagaaaattggtataggaaatattttaaactattaaaaccttcaaatattcattgtgctcaattaactaattgtaactgatgatacaaatcctaattggcttcaattaatcaataaaaatgtcaaacttagaacgtgatttaacaattagtattgaaagagaatcattaattttagattattattatacaaaattatatctttattcattagcattatctggtgatacatcagttaatttgagtttaagaaattcctaaaaagggtaaaaatttaagattagatgaattagctagatattcaagatatgttgaattagcttataaagctgccaaggaagttttagcagttattcaacgtgtaaggaaattaaaattattaaaatttatgcctgttagatgggttacaaaagttattaaaagtgtttcatttattgttaaatgttatcttactttaacaacagatattaatatcaataatggtaataataatgctaatccaaataatcctaactcaaatatgaatacaaatggtgaaattttaaaattaagtgttataccacttgaagaaattataactttattacagaaaactgcaatttgtcttagatatgcagcacctgatgaattacatttatgtacaagatattcaacaattttaatgtatctttgttcacaatttaaaactcaattacgtgaacataatgataaatttaagaatggtataagagaatatgagaaagatgttgaattaaattattatgaaaacgataatgaaaacgaaaatgaggaaatggaaatggaaggaacttcaacacaacaacaacaacaacaacaatataatgaaaattttaatccaaataccatacattctaatgcaatacctaataatgcaatgccctttaatatttctatgaataatgaaacaattaaaaatcaattacatacggataatatatttgaaaacaaaaacttaccacaatttcaaatatttgatcaaaatccaatgacaccattaaatccaatatcagttaatgaaaattatccaccaccaaattcgaattttgttaataatgatgatattgaaaatattaattttagtaatgcaaatcaacaattatttgatgattttttcaataaaaatccaagtgaaaaattatttaattttttttcaactaatgataataatccaggtttagattttgttgatcaatttacaaaggaaatcgaaaaagatttcttaagtaaaggtggtaaacattaattaatatattaatattctatttatctataaacaatttctaattgaaaacttttttaaataatttacgaacggtacctttacgacccagttttttcttaactgattcatgcttaattttaccatcgatggaatttgtgatttcttcatcttttttcaaaattggtgaatgtaatggtgatatattattttcattatcctttatagtaccaacactcttactactataaattgattttaattcaccaaatgattttttagttggtgttttgataatattattatcatttttattaaatggatcaatgggtaaatcattagtagaatcttcaatatattcaatttcaccactttttaattgaattattaattgatgaattaccgattgatgaattattcattgatgaatcatttggattaatttcaattacattaattttagttgattcatcgtttgatttttcccttgataaatttgaatttgaattgaagtgagaatttgagattgaactaatatttgagcctaaattacttttcttaaaatcatcataccaataataatcatccaatacatcattaaattcacctaaatttcttgatttacttttacttaaatttagtccagctaaacttaaatgcattacatgttttgttattgattctttatcaaataatgatgaagattcttcatttaattgtaatgtttgttcagaattaccacttataccactaattatactttgtttcctattccaatataaatctttaccaccaattggtgtttgatatccatcatgtttaatttcaacaatttcataaaataatatatatggagtttccttttccataacttcattaaatgtataagtttttgccttatccttaccaatttccatatcattgaaaattatccattcgttattattactattatttgtaattgatgaagaatattgtcttttacgtacaatactaacataatgaccagagtttgttgaattacctctatgacatacacaactttgtaaaactaacataaatgaacctcttggtgctttatgatcaaatgatctcttaaaatcaacaaatccgggtttcgtcctatcctctgcaataaaatatggatatttgataatttcaggtatagttactttccgattgattttaattggttgtccacgttcattccaaatataccttttcaaacaaattggtataactggacgtttattattaaatctttgattgaaatatgaattattcggtatctgatttatactttcatcatttttgggagtggtgttagtattggtattagtattagcttgaattgaatcaatagtctttgatcttgaagtacgtcgacgataaaattcttcatgattttcaacagttaatttaatttcaggatctgtataataaggtaataattgtaaatacatccaagcaggtaatgaaacttcagtatttgaaattgatgatgatcttctagttaatctagttggattaattaattgaacattatttaaaacacttgctaatgttgatgatctagttctttgtctctctaatttttgattaactgtcctaaatgaaccaatacgatttaatgaatcaaatggctgttggggttggtgttgatgttggtgttgaattagaatttgaagttgaaatatttggattagttatatttggagaaaaatttattatagaattagtagttgtttcaattggtggagtatttgatctatacggtatatttttaaatgaatcagaacctgaatgatggagttatcattgaagaattgaaaattgcagatgatgattgttgaggagttattggaattgtatcagttgttgtattaattgattctaatgatttaagtttatttgtagtgttatatgttaaaatacctaatttttcatattgattgatttcatcttcattattgctagtagtactatttaaatcttcttcattattgttactaatagaaagagctgataatggtgaaggtgatgatgataataataatgatgaatcctctaatggaatttctgaagattcatttgatgaaatgggtggaggtatatttgaagataaatttgaatcattcaaaagatttaaatgagataatgtcattctttgatctatatgtcttctaactgttattgagttattaaaataagtatttaaacattcctctaaagtaacaggtaaatccaatgaagaagaatgaagttggaattgaaattaataaacatctttcatcgattaatcttaaatcatcactaacatttcaatttcccattatgaattatatctaatttcaaagttaataaaggtaatgataaagattctgctaaaaattcaaaagcttgtaaagaatcttgttgtttaccactcaaaaccatatcacaaccaagagaatttaaaactaataataattgatacattatattagtattaatatgttcaccagatcttaataaattaacaataaatctcataattattttcaatttattaatttcaatttgaaaatcatctgataaatttggatcaattgaattatccaagaggaaatcaaatgaagaatttgaataaaataatgaaacaattaaactatctaaataacaagttgtatttttataattatccattccaattaattgaattgatttagaattatttttatattcacctttacaagtaattaatttaccatcaattgataatttaaataatctaaaatatttataaactaataaaatatttgaattattatttgaatctaaatttaataaaataatgaaaactgaaattaatctttgattttcaatatcatttgaaactgatttacctaaattaatttgaattaattgaataatttgtttatgtaaatttttacgatcatttgataatttaatatttgattttgttgaattatcatcaaataagaaaactccaggataatcactcggcagtttcataatttaagggagtgtgatggtgttgtttatagatagtagtatgaagaattaagatagatgaaagaaggttaaaataaggagatcaaattgatcataataataattaagattatgcaggcaggctgcatgtggagaaattacccaacggataaaaattgcatgctcagaagataagatcttatcaacaaagtttgatttattgaatttattaggatcattatcattgttggtatataaagaataatatataaaagtctataaaggtggagtgtacatgtatgtattttgatgttgtggttatgagttgaattcattgtataaccatttaaagagatctaaattacaccaattaatttgatttcttaaaattgatttaatatcagaaatgccagaagtttcattattatcattatcattattatcattaaataaaacgaaataagcaaaccaagatgcaaataatgaataaatacttttcttacttttacaagttaaatttgattttaagatattaatcaatctaattttatgccaattaattaaatcattataattattattattatttaaatcttgtgacattgcaaatgcaataattgatgaataatcatttgaattttggaaaattaaacttatattaattggttttttcaataataaataataacatgaagaatgataaataattgaattaaataaatctttatcaattgcgaaaataattgaattatttgattgaataaattcttcattacctgataatttcaatctccaatcaagtaataaattccaaatatcaacccattgtttaatatcatcattaattaagaaaatttgtaatgcaatattagaaatttgattagaatttggtgaaattgataatgaattattacaaattgtttgtaaaatttctatatctttgataccatcattgataccatcattgaaattttcattaataacattatcgacagtttcatcattattttcatcattattttcattactattttcattactatttttatcattatttttattaattgttcttaaattacaacaaaatggtattgttataagatttaagaaagttttataattttcaatatcattattaaagatattaattgaattaataaaatttaataaatgtttcaatcttgaccaaatttgtgatggatcaatagataagatttcgaaatatgataataagataattgtccaccaaattgattcatttataatatttacatcagtgttattattattattattattattatttgataaaaataattgaatatcatttcttaaaaatttagataattcacgtacacttaagatataaaaatcaattgaattttcacctaaataattaatatcaaatttttgtaaaatttttgaagaaattgctaaaattgcaaaagttaaagattttgaatctcttgagagtgaaagtaaatgatttggattttttaaatgtaataaataagttggatcagttaagaaataatttgataataaattagttaaagattgagtaaatgaagaattaattgaagttaaagatttatcattgaaaaatatgaatgaattaatatttgaattaaaattattaatgttttgaagtgaaggtataattgataaaattgaagggaaattaattggtaatgaaatgaaatttgttttaattgtgggagagatattattaatattattaatatttaaagtattaagatcttttagtgataaaattttatttaaagtttcatttaattgagaaggttttgacataccattttgaggccaaatacaatttaaatttttcgattgacaaaatttacaaattggttttgtttcatcacattttttatgtttactacgacaagttaaacaacccgttctaactcttctcttttcgggtggtgttgaaatagtggttgtattattattaatatttttcaaagattttgaatttttcatggagggtttcctacctctcttcaaaggtaatctatttgaagatattagggaaatagaatccggagataaatctgaaactgatgacattgttatccatatagaaatgaatgaaaatataaatataacctaacccaactaaagatgtatcataagatcaataaccattaatataaaatcaaatcggttaaaagtggataaaattaaattaaaataccgatactaataatagtgaagagcccagtaaataaatttaaatttattattcattaatattcttatcttttaacaccgcggggatttttttttcaattttagtcacgtgactttttatcacgtgacttgtattacgtaataatattttatatttatgaaacaattatattacagcatgaattattgattaaagaagtatagtaggagtagaagtagaagtagaagtagaagtagattaatttattaatctttctttcatttcgtgactatcttataccccccaaatatcctacatatacccttcaatcacaatgtcttggtcaggttttaaaaaagctgttaatagagctggtaatcatgtaattatgaaaactactaaaaattcaattttaaactagtgataataataataatttaattgataatgaatttcaattaattgaacaattatttaatcattttgaatctttaataattgaacttaattcagaattatctaattttaaaactattttcaacgatttaattttaactcaattcttaatatttaaatcaattaattctttctatggtgaggatgaagaagataataaaattaactcttttaataataaattattagaaaatttgaaaattattgaaaatgatttattacctcaattaattgaaccatttaatttaactattttccaaccaattgaagatttaaataattataataaagaaattcataaattaattaaaaagagaggtaggaaaaaattcgattatgaagtttcaaatacaaaattattaaaattacaaaatgattataattctttacaatataatcttagagagaataatgaaagtactaatgataataatcaattagataaattaaatgataaattaaataaattaacaattgaaaataatcaaattactaatattttcattgaattaaatcaaaggttaaaatttgaaattgatgaatttattgctttaagattttcattacttgatccttcatttgaaagttttattaaaattcaattaaaattattttcagatatatctaaaaatttaaataataatttaagttcattaattgattcaaattcaattgaagattatcaattaaataaaattgatgatagattagatgaaattttaattaaaatgaaatcacttgatattgtaaatatataatgtatataatacatcttatacatcttcagaaaatataaattctttaaattctttatatgctttatttaaatcatcattaataataattttatcatgagcaccagttttagcatattccatttcagcagtggcagctgcaattctcttatttaatgaatcttcagtttctgtacctctaccttgtaatctttttcttaattcttcaattgatggtggtgataaaaataaatatcttgcattaagatcagtttttttaactgatttaacaccttgcatatcaatatctaaaatacatgttctctttaaaacatctgaaacatgtttaacagctgcaattgatgtaccataataattacctgaaaattgtgcccattcaataaattctttattatcaatcattttttgaaattgtttaacagttgaaaaataataatcaattccatccttttcaccatttcttggatttctagttgtattagaaactgaaaatccaaatttatcaggatattctgacattaatttctttaaaagtgtacttttaccagtacctgaaggaccagagacaacaataggacgacctgccattataattagtgtttatcgatggtaaaccaggaataaaagataatgataaacacctaatccatatagtaaacaaacagtgaaaaattgaatgaaaattatcaaaaataaataaacacttagaaaataaagacgcgcagtccatttctttatcacaggacatgaatctaatgcttgattttataacaacatcttccttttttatggaacaacaatgaactcaattataacttctatattgcttcaactgtctgtagtattggctaaaaatattatctcaggtggtaatggtagtggtagtagtggtggtaataataacttgaatccaattgatgaaccaatagacgattcacctgatattaatttacctgatgataataacttagaagatataagtccaattgctgatgaaatattctcctcttgggctttattcattgttttattcttactatgttcagctttatggtcttcctattatttacaacaaaagagaattaaggcaattcatgaaactgttttatcaattttttatggtatggttataggtttaattattagaatttctcctggtcattatattcaagatgccgttaaatttaattcaagttattttttcaatattttattgcctccaattatctttaaattcaggttatgaattaaatcaagctaatttttttagaaatattggtacaattttaacatttgcaattcctgggacttttataagttcaattgttgttggtattatattattcatttatactaaattaggtatagaatcaattcatatatcatttgttgatgctttggcagttggtgcaactttaagtgcaactgatcctgttacaattttatcaatttttaattcttataaagttgatccaaaattatatacaattatctttggtgaatcattattaaatgatgcaatttgtatcgttatgtttgaaacttgtcaaaaatttcatggtaaaaatgtagaaattagttcattttttgaagggatttcacttttcttattaactttcacaatttcaactataattggtttaattattggtatattaattgcacttgttttaaaacattcaaatatacgtagatatccacaaattgaaacttgtttagttttattatttgcttatgaatcatattttttctcaaatggttgtcatatgtcaggtattgtttcattattattttgtggtattacaatgaaacattatgcttattataatatgtcacgtagaactcaaattgcaacaaaatatatttttcaattattagctcaattatcagaaaattttattttcatttatttaggtttatcattatttacagaagttgaattagtttttcaaacctttattaattataattacatttatttgtatttgtattgcaagatgggcagcaattttcccattatcaagatttattaattggttttcaagatataaaagacaaaataatttaaataattcaatttcaattattcaagatgaaattccttataattatcaaatgatgcaattttgggcaggtttacgtggtgctgttggtgttgcattagcaatgggtttacaaggtgaatctaaatcagcattattagcaactgttttaattgttgttgttttaattgttgttgttttaactgttattttattcggtggtacaactgctggtatgttagaaatgcttaatattaaaactggttgtattgatgataatacaagtgatgatgaatttgatattgaaattccaaaaataaataaaaatagaaataccatcaataatgttactaatggaaataataaatattttgatgttgaaacatcatcaaataataatagtattaatggtagtacaaataatttaattgatgataatattgaattaactactaatgatggtactaatttaggaattgatgatcatagtaaatggtttacaaattttgatgaaaatgttttaaaacctgtattattagattctttacaagaataatcgattataaaattaagttaaaatattaaataaatatacataaaatttactctttatttattattaagataaaatattagttgttaatttttgttccttttgttgttctaatgccatatctgtacaccattttgctaatttgaaaacttcaggtggtaataataaatcatttaataaattattataatttataacaattttgaaaaaataacttaatgataaatcatttataattttaattgatgtattttcaagtatatcttcatcaattttatttacctttatttgataatttaaaaattcacttgtacctttataaacttttgttaaaattgttaaacaatctggtaatgtattaattattgaattactcttatcttcaattttagcattaattaatatttcacttaatgcaataattgaaaatccaacaatttccttattaggaattctcttatttgattgtgtttcaacattaccataaacaaaactattaactatttgtaaaatatcagttgaaagaattgataattgtgatttaatgtcatttgaaagtatatctttcttactattggtattactaaccttattattaacgttaatgtttaatttcttttcaattaaatctttaaattgtattatactactaccatctaatgttgataaatcagttttagaagatttagcagtatttgtcaaaattaaaaaaaattcacttaataatagagtccaattatcagctctataaaaaatttgtctatcaaggaaattatttgaagttgataaataagcaatttcttgaaatgcagttaatctaataagtggatttttaaaatctttcatacctgataataaagttgaaattggagttttggaataattagtaatttgtttatcaatatttaaacaaccaattaatgcataagcattaaataattcatttagtaatattaatgataaataagttaaccaaaaataaaaagatattgtaaataatgttgaataattaatatctgatcttggtaattgattatttaaacctgttatgaaaactaaaggttttaagaaaatatggaaaaaataatctctaaatattaaacgatataataatggaattgtaaatgaatatattaaatttttcaatattgaagtaataaatatttttataaatggttgatttttcaaataatcaaatggttcttgtctgaaaactccaattttaacacgtaaaatattatattcagagaataagaaatctaatgtgaaaatgattgatgatattgaagttgtaaaacataaatataagaaattatcattaataaaaggtttaattgtcattgttggagtttgaatataatagtttaatgaatttaattgacaaaataaaataattgcagttattgaatagttaattaaaaatgatgtgaataaaatataagtatttttattatttaacaatgaaattgatctgaaaactatatttggagatatatttgaatctgttgttgttgtaaaagagcgtgcttgttgtattatgaaatatcccaaccatagaagcaataatttcaagggatatgaatataattttgaattaaatggtaaagatattgaaaatgtgaatataatagctattataaccgataatcggtaatagaatgtcattcttttgtaaaacactctattgtagagtgatttataggatactaccattgttatatcaactgtctagtgtctatattcaaagaaataagcacaatcaaagacaaatataaagacaaacaatttcaaaatgaaaatcatgaaacccaatgtcaagaaaaaaagcaaataaaacaattacgtaatacgattatacaatatagtgaagggcgatttgattttaatgttttttcaagaccactgacacgttaagtcatgattttcatttgtggacaatcaatgtacaagagttccaagggagaccatagagcacacacgatatctgggggtgattacagtagagatgaggttactaatattcaggagaagttaagtagacaattagggcccgaatttattagtaaacgtaaaggaccaggattttcaagtgttcaatatttagaaggttggaaagcaattaatttagcaaatgaaatatttggatttgatggttggagtactgaagttaaagaatttaaagttgattatatagatgaaagacaaggaattgtaagtattggattaagttgtacagttcgtgtaattgttaaaagtggtgcatttagagaagatgttggttatggttcaattgataattgtaaaaataaggcgatggcatttgataaatgtaaaaaggaagctgtaactgatggtatgaaaagagctttaagacaatttggtaatgctttaggtaattgtttatatgataaagatttcctccaacacgtgactagagtggctgctgagccgcgtgccttcgacgcctcattacttatgaggaataatacaaaggataatgaagataataagcaatcaactaatggtaacagtattatcaataataataataataataataataataataataaggtacaacagtcaagagtattgcaacaaaatgaacaaataaagaatgtgggaaaagaaagggtcaaagaaatagaaagaagtgtgaatgttgaaaatgatgctgaatttaataatgacgacgataatgataatgattcattcctgtttagtgatgactggccagaagataatgagaataataatactgttaataataataatagtaataatattaaaaataataataatattaataataatggatatgccaataaaactaacaataatgagaaaatagataatttaccaccatcacctcaacaagtcaaagtacctgatcaagtggtttttgtacaagccagtgccgcatcatctattcaaaaagatccattactgcagagtaaaatgacgtatacactgaaaccattaacattatcatcatcaacaactccaacaattgatcaaagtaaatctgttccaattaagaaacctgttaatcttgctgttgcaccatcaagagatccactcactaagagagcttttggtgtaccacctaatatgcttaccagtaaaagattgagaaaatagtactactgatactgataaagggtaataatataaaaactgagatccatgttccccgctatagaaaccaggtaaaaaattgtccatcgcgaactactccccggagataaaatgtattttttggctcattggaccctggtttcttgctgatgatttgctactatatatttgctaccatatcgtcattaacatatttaccttggattacagtttagacaacagtggagtatctaactcctaagaaatactcatcatatgtcttgctctgatttaatgttttgttatccttatcattctcaatattattatgactaaatgggataccagatgaaagagtgtgcaatcacattttcttttttgcttaataagttctaatttactatatcttttaccaccatatacatcactaattatatatatcctatgttaatcaaattaactctgtaatccaattacatcaacagaacgtatataaacgatgtaataaacacttgaacaccgatttcatacagagttcaatatactcctttcaattctaaccaattaaaatattatccaccatattatatacattactacttttaccaactagagactgagaatataagctgaacagtaattctaaagtgtgaaaaaacactatgaaaacacaatttttcccagggtccacgcaacgatcgtgtgacacgatatctccgttcattttttcattgtttccgtttaaaactgtttttcttactggtttttcctgtttttctctataaggtatttcttcataacctatttcggagttatcgttggtgtatacagtcagtacctgaaccattttttctgctttgctgaggagaaatacttccgaattacatttaacttgtcttttacctattattctgttatccaaccatatcaatttacaaaaaatttagattttatcgtattgtgattgaacccttaagggtccatttatttacaaattaattatcagaaatcataaaatttatacaattttttttttatcttattccaatcattgctgtttaaaaaactattgttttaattatttattgtcccttggtaaaccttttaaatatctaatggaatccctcatctaacctgtcttttaaataaattaactctttaattatctttaaataatttatacttttttttcgtttcttcaaataagcaattcctattaacttaatagattaatgaagttaacaactttccttcaatttattttctttgcaattgcagttgatgccggtccttggacaagatattcacatgaatattatgcatcaaataattgtaaattagcagttgacggtgttgctaatttttgtggtaaacctgaagctgctaaaaaatatgcatgtatttgtaaaaataagaatgcacttgtttcatggcttaattgtggttttgaatatttccctaatatttctcaagaaagttatgttcaaagtgttattgatcaatgtcttgcaaattcaaaagtaaattcaactacaatgaatgaaaaatatttaatgaaattatatgatgataacaaatcaaaaattgttgatgttaaaaatttcacttctccagatttccctaaaaataatactgcattcccaatttcaggtaaaaaaatctctaaaactgctattcttggttatcaatcaagtagaaatagatggggtaatgtttcagcttctcattatcttggtattggtttccttgcagcgtgtggtgcaattggtttaattgctggtttaattaattggtcaatcagatttagattaattgattcattaccaaaaattttaaagaaaaatgttacattagcattatttggtaaaaatcatctacattctaattcaaatatccttggtgttaaccctgatagacttgaaactatattaattggtgcaatgttgttattttcaattttagctaattttattcttggttataattatatggaaggtgacacaattttcgcaaaaaagcaaactggactttcaagatattatggtgatagatcagcaattctttgttcctatcaattaccattattatttttattccctggtagaaataatttctttcaatatattaccagatggaaacaagctagatttgttacattccataaatggttagctagaattgttattgcagaagttctcattcattcatttgcattaggttcacaaactgcttcattaccaaaatttagtcaacgtattgataaagcttattttagagaaggtatagcagcaactgtttttggtttttcaattttaattttatcatttggttatattagaagattttattatgaattattcttatttattcatattgtgtttgttgcttgctttttatggttatcatatttacatgcacttgatcaaaattatcaacaattttattgggcatgttgtggtgtttggatttttgatagatttattagaatcttaagaattttatcatttggtgttaaaaaagttgaagttgaatattttccaggtgaagaaattattaaattatcagttccaaaatcatcattacaaaaacctcatccaggttctcatgcatttattcatttcttaacaccaactaaatttttgcaatcacatccatttactgcatacccatcaccaacagattctaatatttttcattttaattgtcgtgttaagaaaggtatcacaagatatattgcagataaatgtaaatcatcaggtaaaaataagatttcaatgaaaattttaatcgatggtttctatggtgaacaatcaccatatcaaaactatgataaaacagttttaattactggtggtacaggtttatcaggtccatattatcatgcaaagaatttatctgtaattgattctaatagagaagttaaattatactggtcaattaaatcatatcaaggtgttaaaagttatttaaatgaaattttatcatttaaggatacaattgttaaaccaattatttatatatctaaacctgaaataaatagtactacaacatcgagtgatgataatgaaaagagagattctaattcacaattagattcacaattaattaatggtgatgaattagatgatgaaaaagttaataaattattatcatcatttgcagagattagacatggtcgtatggtagcatcagaaattgttcaaaatgagattaatgaatcaaagggatcaattgcatttggtgcatgtgcacatacagaagttgttgatgaaattagaacaacagttgcaaattgtttatcatcaacaactaatagagttgattattacgaagagatgcaattatggtgattgtatctttacttatacttagttatttacaatttacaacttagaatttataattacattatttaattttttttttcctgaacttgctattttatgtatagatgtagatttaattatactataatttcaaacaaaaacattagaatctcgtaaaaggttttactatgttacattattgtttctaaattcaaccaaattgattaatcctacttttaaaaactctaaaaagactgacttatcaaataagattataatacaagaattacttatatgctcttcaacgcttgctctccaatgaatcaaaaaaaaaagatgatgatgaatattaatgtgggattaaggtacaattaaggggataaactggacttagataagcaagggtgtgacagttacagaaagcatcaagacagttaactcccaaactaatgcagtaatagacgatatgtccgataacttcaggtgtagattgtagattgataccaattaaagtgtgaaaattgtgagaaaattaaaatttaaaatacctcgtgtgacgttaagggaaataacggacttatcggtggaccctttgcactttctcaggggaataacactttaaatttgtttgttgaatatatatattgaatataataagtaaaatcttatttaataggatggtttcgttcattttggacccttaattttgttaacttgtctcatgtgggtacttttatttaagtatttcaacttattttaaagcgtttaaagtgctagaaatcattatatgtgcttagaatagtcaatatttagtaaatacaccatgttaaacaaaatagaaaaataaaacaagtagccaatttatatcaaatcaaacactgttattattaacaatttatgcggcggtaaaaggaataaaaggcggaatttttgtaaattttaatttacaaatatatttcctttttcaaactgattgattgtatgaaaatttgaactggccatacacaaggttataaattttaattacttgatataacatttctattgtatttgattgtataaatttatttactataaatccagtactgattccttactatttaactaatgggtttaaaagattatcagaaatatgattcatttgttgtttttaaaatagtattttagtttatctaatataattaaagacaaactacaaccctacaatgaagttattaacattacttcaattcttattattatcattaacagttcatgctggtaaatgggaatcttattctcatgcatactatgcaactattggttgtaaattagctgttgataaagttgctaatttttgtggtgttgctgaagctgctgcaaaatatgcttgtatttgtaaaaatgaaaatgctcttgtatcttggattaattgtggtttagaatatttcccagaaattaatgagaagaatatttattcaaatattgttgatcaatgtctaacaaattcaaaagtaaactcaactaaaatgaatgaaaagtatttaactaatttatataatgaaaataaatcaagtattgttaatgttaaaaactttacttcacatgattttaagaaaaacaatactgatttcccaattgctggtcatgcattatcaaaaattgctcatgttgattatcatggttatagatctagatggggtaatgtttcaacttctcattatcttggtattagttttgttgcagcatgtggtgcaattgctttaattgcaggtttaattaattggtcaattagattaagattaattaattcattaccaaaagttattaagaaatattttactcttggtttattaggtaaaaatcatcttcatactaatacaaattctttaggttttaatcctgatagattagaaactttcttcattatttgtatgttcctatatacaattttatcaatgtttattattggttatagttatcctaaaggtgatccaatttttgcaagaaaaaaaaccggtgtatcaagatattatgcagatagagcaatcattttagcttgttatcaattaccattattatttttattccctggtagaaacaattttttccaatatattacaagatggaaacaagctagatttgttactttccataaatggttagcaagaattattttcttggaaatccttgttcattctttctgtatggctgctcaaactgcttcattaccaaaatttgctcatcgtattaaaacaggttatttcagagaaggtattagtgcagttgttttcttctttgtcatacttttagcttcgggtcgtctcattagaaaatattcttatgaattattcttccttactcatattattttagttccaaatttcttatggcttgcttggtaccatgcacatagtcaagattatcaacaatttttttatgcatgttgtggtgtttggatctttgatagagttgttagaattattagaattacatcattcggtattaaaaaagttgaaattgatttctatggtggtgaagaaattcttaaattaactgtaccaaaatctgcattacaaaattgttatccgggtgctcatgcttatattcatttcttaacaccaactagattttggcaatcgcatccgtttactgtttacccatctgcaactgatgataatgttttccatttaaattgtcgtgttaaaaggggtattactcaattccttgccaaaaaatgtaaagaaacaccgaatggtaaaatttcaatgaatattttaattgatggtttctatggtgaacaatctccatatcaaaattatgataaaactgtcttaattactggtggtacaggtatttcaggcccttattatcatgcaaagaatttaattgcaaataattcaacaaaggaagttaaattatattggtcaattagaactttgcaaagtgttgaaagttatttaccagaaattttatcatttaaggatacatcaattaaaccaattatttatgtttcaaacccgggttcatcattaacaacttcaagtgatgatggtgaaaagaaagatggtgattcaattactgatgataaagaacctgatcatgataatctaaatgatgaagaaattttaaaattattatcatttgcagaaattaaacttggtcgtatgtcagcttcagaaattgttactgaagaaattaataattctcaaggttcagttgcatttggtgcttgttctcatacacaggttgttgatgaagttagacgtactgttgctggtgttgttacttccacttctaatagagtggactattatgaagaaatgcaattatggtaatcaaataatttttcattgatttcattatagttaattttacttcacccttttgattttcaagacaaatttcactttttatcattttatactattcattatttttgtttcataaccaataatatatacctaattatatccctctaatttaaaaccaatcgttatttaaagtaatcaattttataaagaacaattaacgtacggtcattgcaaatttaatctcagatattttagatcttccctcactttagtccgattattttaaattcccagtaaatcggacggtaataattttattttctattaagtttatgggctatttttacagcactatattagtttcttttatttgaaactcacttttttgatgttcttaatgaaatactgtttgaatcagttaaaaaactagcatttttgttttttttgcataaattttactttttctactcaataattttatttcattaaaagttatagcaagatttttaaatttttttgacaaaatcaagtttaaatttaatattatagttttaaaaatcaaacactacttgatcaagctcttagcagcttaactacagctgatcgaacaaaaaccggtgctttctgctagatattgccaagggtcacgtgaaaaagtaattacgggttttaccacaacttaaagtttttaacaaaagctcttatggccaagttggtaaggcgctacactagtaatgtagcgatcctcagttcgactctgagtgagagcagttgtttaattttttgtttaacgttcttttttgttttcgtttttggtaaaatactataaaatcattttgttaatcaaaagattcaatactacattctttttagtgaactaataaaagttttcatcatttaatagtagtagattatacaagtgtaaataaataatagtaatatagataattttttttttggaattttgaatttttttaaagtgacttgggaaaatgaataacaataacaataataacaataataaaggaatgtatgtataatctaatggaatttatattaaagtagaaatactatatttaaattttaataccagaagaaacttctaattgttcaataacaggatttaaaacgtttggatttaaatctttatttgttaattgtaaaaattcttcagtccataaattttctagaggattttgagagactgaaccaacaccacaatgaccaccaatattttcccaatcattaactctctttaaatttaattcattccacagttgatcaacagattcaattaattgatcacaaatttctttatcatgatgtggagaaggagtaattcttaatctttcttcaccagttgaaacagttgggaaattgattgcttggacataaattttatatttatttaataaagcatcagaagctttctttgcatcagccgcattaccaactaataaaggaacaatatgtgaaggatttggaataactgggataccaatttctttaaattgttgtttaacatatttaacatttttttgttgattaactctatcttcaatattttttctaacaattctaattgaagttgataaaccggacataacagcaggtggtaaagaagttgtaaagataaaacctggagcaaatgatctaatccaatcaattaaatttttatcagctgcaagataaccaccaacaacaccaaatgatttacctaaagtaccagtaatcatatcaactctatccataacagttttataatttggagatgaaatacctgaatttaaatgagctttaaaatctaaatgttctgcaacaccagcaccatgtggaccatacataccaacagcgtgaacttcatctaagaaagttaaagcaccatatttttcagctaaatcacacattttttcaattggagcaactgaaccacacattgaataaactgattcaaatgcaataatttttggagttgattttggatacattgctaattgagattctaaatgatttaaatcattatgtttaaagatatgctttttagctcttgaatttttaataccttgaatcattgaagcatgatttaattcatcagagaaaataactaaatctttaaattgtttaccgaaaagagataaaattgcatcatttgcaacgaaacaagaagagaaaaccaatgcaccttcctttttatgtaaagcagcaatttcactttctaaattaattgcatgtctattatgaccagcaatatttctagtaccaccagcaccgacaccataagtttccattgttttaatcatttgattgaaaacttcttgatttttacccatacctaaataatcatttgaacaccaaaccattactttatcttcttcattttgtaaatgagcttttgggaattctttagctaatctattaatattattgaaaaatctataagaattatcaattctctttttatttaattcattttcaaagaaaccattataatcagttgcaatttcatttgaagataaattaatgttattattagatttaacagttgcatcatgatttaatttagtaactttaatagaatcagttgcttgagcagatacaaattttgaagcttgagtataagatctctttgcttcaattgcaggacccataattggacacatagctgcttcattaactaatgaagaatttttagctaattttttcattgcagcagttgaatgtgatttaacaaaggggcaaacccttaaagaagctttagtaagtgattccattgttagttaaaggttaactttggttataaagagttcaaaagaggtaataagaagaagaaaaagagaaaatgaaaaatcaaaagaaaagaatggaaatataaatagaaatagaaatgtactagaaggggtgttgaaaaacagggaaactaataattttttccattaagagagaaacggttaagtggacgtcaaaatttgaaaatttgaaaaatttgttagggatttgattactttattaagtaatggttttgtattgtattgtatactatctactatctaatatctatatgatcagactatgtgtactatactgctactaccctgatacatatatatatatatactgatactataccaatactatataactaactaatacacaatatgtaataagtcaaaccccgtaagtcatgacaataataattaaaatttaaggatcactcattggataaataataccattacgtaatatttgatatgatttattaatattaataataatttataatttaaaaggtctggaaatagatacctttcacttatctcatttcttcaattactgcacaattatgtcctctaatgacaatctagtactcaaatatgatactcagtatctatctctatcatatgacgaaaaattgtctcaaataaacttatctagatctctcccagaagattatgacaaccataaaataatttcaattaataataatttgatttcaaatttaaataatcatcaaatattcataattgattccaaaatatctccaaaaaattcaaaatcttattctttatatgaatcagtacttaaacctatatttcaaattttaggtataaattatacctatcttaagacaaattcatcaaattcaattaaagaatatgcagatttaataaataatgattccgaaaaacacttgattttatttatttctggtgatacaacaatatttgaatttatcaattatgtgtattccaatcatcaaaataacttaaataatataccaaatttaacaattttaccattccctcatggaactggtaatgcattatcaatatcaatgaataatttaaatgatttaaattcaattgaaaaattatttaattggaatcaaaaacatttaccaatttatcaacttaattcaaataataacttaattccaataaatgattcattaaatactttacagaataaaaatatcttatttacagttgtggcttcttggtgtcttcattcaactttagtctatgaatctgataaacctgaattaagaaataattatggttctgaaagatttagaattgctgcaaataaaattttagctgaaaatccagtatttaagggtaaaattactctacaacctgataataaatcttttatctataatgcaaataaatggtcattagacagcatcaactcaaattcttttacagatttatcatatttagttgttgctgctgttcctaattttgagaaaacttttaaaatatctccacattctactattgagtctgatgaattacatctaatcacaataccacttgtaccatcagataaaacaatctcattaatgaatgatgcatataataatggtatccatataaataatcctttagtaggttatgaaaaaatttcaaagactaagactttagaaattgaaatagataattcaatgtcttcaaaattaagtatagtttgtttagatggtagttcatgggaagtcaccgggaatgacaggaaactatcaattactgcattttatcaatcatttttatactacttatcatagatagaatatcgatatattataacaacttttctaaataaaatacatttttttaattcatattatataacatttaagtaaaagcacaatttaaatacaatttataagattgaaaatactttcattctttctttgctcttttatcagcatcttcctgttgaggaatatttcttttattagtatcattagatccattatttaatgatctattattattattattattagcattagcattagaattagcaaaattaaatccgttacctggtacaaaattcatattaggataaccaccactcatattgttgaaatttggaatatttggaataccattcatattattcatattttgaaattttgggaaattattgttcttattcatattattattcataatattacccatattacccatattacctattttattcatattattcatattattcatatttccaaatgctgacatattttgttgagtagttgggtttctattattagttgacactggtccacttggagtctttttaccttcaccttcaagtttctttatttgttgctctaatcttgtaattttaccctgtaaaattttctccttgaactctttctccttttcaacagcagttctgatatccttctttaattgctctttctcctcttcaaattgtttgagcaacttagatttctcttcttcaaaattttcacctttattatcaccaactttagattctaattccttaatcttattttcatatattgcttcaagttcttcacgcttagctttggctctcttctcaactatctcattaatctttgcttgtgatggtgctctaattttaatcttatgagattcaatctcttttaacagttgaagatcactttcagcttttaatttcttcttgaattcttcaatatcttcaccatttacaggagttgatttagatttcagttcttcttcaagtttcttcaatgcttcttccttctctttcacatacttagcttctaatgcttcaatatcaacatttgaactactattcttatctaactcttcaatcttcttctttaattcttcaatcatattcttagattcttgaacctttttctcattctccttatttatggattcaatcttgagattcttttgatgaacttcctcatttaattttctgatttgaagtctcaattcattttgagcatctgagttattggtattagcttgaatatcagaaagtctcttgatttcatcaagtgcttgctgtctttcagtacgtgctttcttaagtctttcattgaagtcacctctaagtttttcaattactgctgatttttcttcaactttagtggttaattccgtaatcttagcatctttttgagccatatcctttaatgatccagtggcatttgctaattcggtgtttaacttttcagcttgttgatttaactcaactaacttactttccttatcacttaattgtttctttaattcttcaacttcactacctaaattattactattattagagaaattagcaatattagattctaattcattgattctattttcatataatttaatttgatctcttaaaactttattattctccttataaatacttaattcttgaatttcatctttcatgagagctaattcatttgaatatttatcaacagcatctgatttttccttcaatgataaaatttgaacctttaattcattgatttcagtttccttcattgtaatactctttctaagaatagattcttcaccttgaacatattttaattgttgactcaaagaatccttttctctacttaagtaagaaactaaattcttcatatcatctgaattaccaaacgataatggagactcttcaatttggttgattaatgttctattttgagtttcgagttcagaaattctgattttatcatttctcaaatcttgttctaatttcacaatagtagatttattgttgtctttttcttcttctaacaatttatgtgattcatccaacttgtttttgatggattcaagttcatgtaaacgatcttcagattcctttttgataatattattcaaagtttctaaggtatcaatttgattagacttatcagataataatccattcatttcatcaagggatgcttctttagagtgaacatcagatttgataatttcaatcttagattcataatcattcttaatagagtcaaatgttgaaattgttaagttcaattctttaatttttgattcaaattcttgtttttcagctctagatgatgtttctaaattattgtaatcagattcaatcttttccttttcagtttctaaagtagttatggtttctttcaagttttcagcttcttcagtaatttttttgattttatcttcagaaatttgcttatattgagtataggtttcattcaatgaatttaactgttgttcagttacagcagctaattccttgtattgattggaatcttttgttgcaatatctaaatcctctaatgcatgttgtaattcttctttcaaaacaatcacatcatttgatccatcgttaccaccaattgaagttaacatagtttgttttctttcatctagtgccgagtgtctctttttcaaattcttgacttcttcacttaaatcttgaatgatcttttcctttgcagctaatgaatctttgatggaaatgtattcttcatttaataaatcaattctttgttgataaattcttgaatctgtattcttggagtgtaaaatattactaatttcagaattgctcttatcaagtttagctcttaatgtttcaacctcacgttgtaatgaatcaatattattggtatatctttgaatagtttctttaatactagcctgtctttcaacatcaatggtttgaagactaataatgattttgtttgattctgccttttcgttatataatttattaacattatctcttaattgttgttcagcagatttccaaacttctttttcagcagttaaagttttgagtttgagttcggagctaatcatttcggatttagttttgactaatgaatcgttagcaacttgtaaattagcttcaagtttagtgagattggtattagtcttttctaacattgattttaattgttcattttcatttttaacaaatgataaagttgattgaactgcacctactctttccttgtatagctcagcagtggattgctctttagataagtttaataatgcttcattcttttcagaaattgcattttgtaccttggtattgagttctgcaatttgagaattatatgattttttaacttcagaaagttcttcctttttagattttagttcctcaattaacaaattgagtctttcattagttgcatcaatatctttcttttcacttaaagtagcaacaccggaatcaaataagttttgaagcatatccttagcattattagcagcttgtacttgagtttccaatgttttaacttgatcttgaagtttagttatagcttctttagctctttgaatggttgaactttcggcttcttcaatcaaattaccagcagtattatctctattctccaaatcttcacccaattgacgtgaaataaccagtaatttctcgttttgtttaactaaatcaacaacattcttaaaagtagaaagtctatcagaaattagtctattagtatcagtatcatcaatagtttgaattgcaccataagaagtaacaatattattgatagattgcttttcttcagaagttaatggatgatctccagagatcttaaattgcatttcagttaataacacacaaatttgtctttgaaggtcaatcttgtatctattcaagttacgaatctgtaattgaaattcttcgttctttttctttaaaataacgttggttttggatagattctttttatcattagttaaattttgtataacagcattaagcttctcttccttctttacaatatcttcatatttatcttgataagattgtagcagtggcaatttacgttcaagttcttcaagaacatgagataattcattttgtgctttaaccttcaaacgtttttctcttaatgtttcttttttagactcatttagattagtaattaggtctgttaatgttattttagaatcaatttcattcaatgttctttgtgcggataatggatcagctataccattattttcaaatacaacagattggttagatagctcattaatctctttttctaaattttcaattttgacatctctttcaatgatttggttttcaagatcttcgaatttcttttgatatgatttttcatcttcttcaacttttgcagttgtatttgcatataattcatcaagcgatgcaattctatggatattgtctttcaatgatttttcaagcacttgaatatgttcatcctttctagaaatttgagtcatgtattgtgattcttgagcagctaatttgtcagttaattccttaattttaaattgatattcattattttgagctgttgctttagaaaaattagattgataggttgaaagtgaagtttgtgaaatatcatacttctgctttaccccctcaagttctgatttatatttgtttaattttgacgagtattctaaattatttgaattgatttcttgaagtttattgttaagttctttttcataccaattacgagactctgttaataattgtacttctctttcaaacttgttgagttcaaacttatattttaaagattcagaaccactctcttcatttaagatttgtaagtcattaattttattcttgaggtctttgttttcatccaccaatttttttaattctgtgttcagttcattgaattgaatttgtttgttttctaatagttcagatgcatttatcttttctttttgaagttctgaaattttcaatttcatttcatctataaccctggcattctttgatgatgaagaattaatactttttaatgtcgattcagcattcaagaaatcttgttcaattttggcctttgatttcactaactcatccatttcatgtttgatatttgatatctctgtttttgcagcttgcattctcttttgatgagaatgttgtaattgttcataattgatctctaatatttgtgtgttagatttgaatttttcaaaatcagtcattttgtataaaagagagacaaataaatccttatcattttttagcttatcaatcgaaatattgaagaatacagaaacagagtttaaatcatcatcagcagatataaattcgtcatcaaactgaactggattctcaggttcttcaacaatatcttcgctaacaactggagctgtggtaggtggttcggtatccatatgatcttcatctacttgtatctcttgagaatctatgtccatttcaacttgttcaggagtaccatcattttggtcatcttccatcaaaacatcagcttgaacatcaacttcctgtgcatcttgtttatcaagattgtctggaataacatcaatgacagaaacagttttatcttcttcagtgacaggttgagcgtttgaagtttccaccgcagctaatgagactggatcagtattttcaggtttatttgatctttcatcagtaactcctttaacaacattattttcattgtcattaacatcttcaggaatagtaatctcttctttaggctcagattgatcttcaattagttcttcctcaggttgatcttcaactaattgaacttcaggcgtatcttcaataacttcttccacatgttgatcttcaattagtttttcttcaggttgaacttcaggctgatcttcaactaattgaactttaggtgtatcttcaataagttcttccgcaggttgatcttcaattaattgaacttcaggtttgtcttcaataagttcttccgcaggttgaccttgaattaactcaaccgccggttgatcctcagttacttcaccagtgacacttcctgttttttttaaatcactcttttctgtttcaacatcagctacagtttcaatttcattagatttaacattttgatcatttattttaacatcgttattattagattgattctcaactggagttgaatcagaagcatccaatggagtttgactgtcatctttagacacagattcctcagatgtgcgatccattgataaaatttagtctaattacccaagattggccttgaaattcttttgctcaacaaaaatcagttttattcaaaccagtaatcttcaatattaatttatctcaatgtcgcaaatttgaaaataccattttgttacctgtcacattttcttacttcacggtgtacgggcaaaacacacttttacccaattttcattactttatgggctattttacatctaatttgttaaaatttttgtcagcaacaaatattacaataacatattcttataaatcaatttgaattgtggttaaaaacaagcaaaagcggacgaattcacctcttatcactaaacattccatagaggtcgcataaataaaaattattttaacatgaaatttaaatcttttcaaaatgctacgccaaacacgtcaaagtatctcatcctgtttataatataatagaaaataaagaatggcagaagagtttcctattcaaaaggaatatgatggtatgtgaatatattttatttattttatgatttttacccagattgtactaacattttatttccaaagaacttctgaaactaaaagataatttgttatctcaactacatgaaattgaaaaaagattagatatattaaaaccaagacttcatgatgagctagataacaaacatatagtaacttctgataaagaatttgatgatgctaatgttgatccacgttatgaaaattcaaaatataaattttcaaatgtaaaatcagaaccatcaattccattaactgtaccaaaaccttcgataaatggattatacaagggatcacagatgaatgatttaaaactagctcaaaagagaagagaagaaatgcaagctgctaaaatcgaatcacaaataagagacagtaaggaacgtcataaatttctaaaatcaaagaatgattcttctgtttcagtatcaagattaaatcaatcaattaagaagactaaagaacacttaacaaaagttgacgaacgtgaaaaggagagaccaagaaaacttgctgatgaacctgtacgttcatgctttgattatgtcgaaggttactcaaactatcatagagatgtagtatcaaataaaatcaatggcttagacgataattatgatccagttagagatcctgcatttgatatttattctagaatgtatgtttccaagttttattttccagaagatgtgataaaaagtcaaatgaaagatacacatgttttacgaatacctaacttatttagtaaacttccagcacatttagaagagttaagagaatcaaatttcatagtaacaggtgtcgtttcagctaaatctgaaccaattcttaatcccagaaaaacatcaaaatacatcagaatcagattatcaaattttaaagtggatatactgctgtatttgtatgatgatgcatataaaaaatattggaagataagtccaggctctataattgcacttttaaatccaaaaattgaagatataggttattatagtaacaaaaatggtagtagttctgcagctaactatgttttaaaggtttctgaaagcactacaattttagagtatgcaaaatttagagatattggttattgtcccggaaccaacaacaaaccatgtcaacaacttgtcaataaaaaggaatctgcattttgtcattaccatcaacaaaaacgtaccgataaaactgcatctcatagaaatgaaatgggaactaattatagactttttgatccagttgatgctcgtggaaataaacaagttatggttatgacagagaaacaaattgaacaaagtgaacttgttattgataataataaaaataaaacgggtttagcaatcgaaaatgttgcaagaaatccccaattaagaggaaaagaaaatatcaatactgaattattgattactgatttttctaacccaactacattgaataatctgaaaacggaagaggagaaacaaagagttaatttcactagtagtaaagctaatgcagctttctttaatgccgacaaagttaataagtatgcattgattaaacaagaaaaggacaggaaattagataagaaattaatgtctaagaaattagaacttgattcattagcattaaaagattttgaaaagaaacaaactgcaaatgaatataaaaaacgtcaaaaattacatggcaaagagacaatacaatcattaatggaagctagtaggactgaaaaatcattacgaaaagatagagaaactgttgagaaacgtttaagagaaaataaagagatcgaagagcataatagactatacactatgaataaaagacgacaactagtcgatgcaatagacagctcaaagtatagtgaaactactaaacttgtaaaaaaattagaaactgaagttgaattgagtagtgatgatgacagtgacgaatttgaaaatttagcaagtatacgtaagtttctataatattaaacacatgtaaacctttataggcatttgtcatgatttatacgagtaattataattttcattggtatttatataagaaaaagctataaaagaaaggtagcaaatcttccaaaagagtcaaacgacagactattttttcattggtatattaaattaattattcaccagaacttgatgaacaaaattgttttaaaattttccttaacaaaggtcttgagaaaggttttgataaaaagccagacatgccagcatcaatacaatctttttcattagaaacatcagcaaatgcagttaatgcaacaattggaccttgataacttaattcatttctaattatacgagtagccaataaaccatccattattggcatttgcacatccattaaaataagatcaaatggtcttgagccattattaatacattctttaacaaattcaaccgcatctttaccatctcttgccataaatatatgattaataccttcaagtttaagcattcttttaacaacttcttgattaactgaattatcctctgcaaccaaaagtttcagatctggatctatattatcatgaacaacagcaatatcggaagatgaagaatcagattttctagatttatatgaatgtgcagtaccagtcgatgctcttgttattaattctggtttatcataatttttaggttcagtgaaaagtgtagatttagtatttgatttagatgttgtatatttgtaactatttgctagatccatcgttacatcattatgaataactgatgttgaaggatttttatcagatgacaaagtatcctcattttgttcatcaaatgtaactttcttctttttatttaatttttcattataaatatcttttgaatattcttctaattcatcacttactcataattaattcaccaacttgaggtaaaggaattgtaaatgtaaatgttgaaccaacatcaacttcagaattaagtgttaaagtaccatgcatcattttagcaaattgtttacaaattgataaacctaaacctgtaccaccatgagatcttgataatgtttgatcaccttgaacgaatgcttcaaaaattttatcttgtaaagatttttcaatacctgtacctgtgtcactaacagaaaatctaataacccaatttttaaattcattattataattattatttttatcattttgattattctcttgtagatcctcaaaatcaatattatcagcaccaaaattataacattttcttgatttatgaacagattcaaacttagaattatttgaatcattagaaaatctatcttcattgaaatattccatatgacaatttggtgatttgtattgatcagataatgctttggcatataaagatgatcttaaagttgataaagttgaagtagttctatttgatattattgatgaattatcatcagaaccttccttttcattagttataccactatcagtactatcatcattaattgatttctcttcattaatttgtttaacagggtaatgatcagtatcatattgtgaacctttaatataaactttttcataattctcagcctttgaacgttcttcatcatattctcccaataattgaattaatacacgaactgtaccattttctggagtaaattttaatgaattactaactaaattcattacaacttgaattaatctatttgaatctccataaagaattatttttcttataaaatttggtttaattgaaataactaaatcaacttcttgatctttagcagttttagcaaaaattgaattaatttgtgaaacaatttcaataacttggaaatttttcttttgtaattttgatttatctaattgatttttagagaatgttaataattgaattaaaatatgtaataataattcaccacttctgaagattaattctaatgaattttgaattttatcaatatcagtttcactcattgcaactgatgtcatacctaatataccattaagtggagttctcagttcatgagaaatatttgcaatgaaaactgttttagcttcatttgccttttcagcttgttgtcttgccatatcagcttgaactttagcagcttctaattcttttgttcttgcacgaactctatcttcaagatgagtatattgacgatcaagttctaatgtcattgcattaaaggcatcagttaattcagttaattcatcaataaataaacctttagtttgtaccagtgaaggtaaaggagtattttgataatccattgattcctgtgtattataactatttgaaaaactatcaactgatgaaggtgtattcaatgaaccattccaactatttctaacacttgaagagaatgattgtcctgttggagataaattaggtggggataaatattcttgatttttattatctttttcattaatgtcattattatgggtattattttcagcatttgaactattattattatgattgtacattggtcttaaaaaatttaataaatgagttgaatgtttcctccttctcttacgattcagtcctcttctattagttatttcttcagttgccttttgaagttttaaaataggtcgaacaccataatgagctaacgggattgttataaaacacataaaagcagctaaaccaatacataaaccaaccataattttaattaatttagtaataggaccttcaaattcaggttgaacttgttcaacagtaactaaccatagggcaaatcctaaatctatagatgaatagcctaacgaaactttttgacctgcagcatttttaatattaacataattacctaaatcttcatgtttttggaaaacatcttgagcaggtaaatatttagaaatgttgaaaacatcagtagttgtgatatcaaaagattccaaataagaattttcaaaagcatgtctaaatcctgtataatttgttaaattattatatgggtgaattggtaacaaataattaattgaggaatattctgcattttgagcagcagataatagagaatcattaacagattggaaattaattatgacagttaaatatcctgaaagaaattgttgaggaactaaaatagattcatttgaataaactggtacagttaatgaaataaaataagcttcatcatccagtattggaccatctaaataagctccatttgataataaaccatcaggtaacgaaggaccagatgaagttgtattttgatcgaaaataaataaagaatctaaagttgattgagatgcattatgatttgaataaggatttgaagcatttgcaactaaaataaaattcagatcatataaatttgcatatgaaaaataatttgaagcttgaattgtttgttccattacagtttgagcatcacttaaagcagatggagaaacgttaccagccttcctcttagttaaagcttgttgaacagaaggtttaccacttaactgaagagcttgaaaataataagtatccatagattgttgtaattgagaacttttcaattcagatacaacttcaagttttgaaactcttgtatcagttaaaactgaagtaaaataaacacctgtaacaatagctaagattaaaagagagaacattgcaacaaataggactaatcctataagttgcgttagtatggacactctaagtctatgtttagggaacatcatttaagtatatagacaggggtgtgtatatgacgataacgatgatgatgatcgtatactataatattgtgtatgagtgtctgagattcgttatagcttatgcaaaagcctttgacagcaagttattgttattcagtaaaagattaaagtattggaaaatataataataatttaattataaaatttcatgcatacattaataataataacatataagcggttagtactattatcaaaattaatgatccaaattaacatatccacaaattgaaaaaaaaaaaaaaaacatgttacgtaagctagttaattacctaattaatctgacgtatagcttatttgaaaaattgaaaaaattgaaaaaattaaaaccaatcgaccaatcgaccaatcgacccacagttccatcgacccacatgttgaaaaattcaatcggaacccgttcaaaaatgaaaaaacaaaaacaagaaaaatttcaaaatttctccccatttcccacaacttcccggaaccggctaagtttcaacaaacggaggaacacagagcggagaatgaaaattattttaactaatgaatcttcaagagttaattattacgataatgactcttatagaataataaggctgaaatttcaatctgtttaatttagcttttcatcatttcatttctttccttcggttttcttttataaacaatcaattaacaatgttatcatcaacagttcgtgcacaatctcgtttagctgcaattcatagacatttctcaacaactttaacttcaaatggtaaaattcaagttaaaaatccaattgttgaattagatggtgatgaaatgactagaattatttggtctgatattaaagataaattaatttatccttatcttgatattgatttaaaatattatgatttaagtattcaatcaagagatcaaactaatgatcaaattacaagttgatgcagcaaatgcaattaaaaaatatggtgttggtattaaatgtgcaacaattactccagatgaagcaagagttaaagaatttaaccttaaaaaaatgtggttatctccaaatggtacaattagaaatatcttaggtggtaccgttttcagagaaccaattgttattggttcgggtccaaataaggatccaaatgatattgaaattccaagattagttccaggttggaaaaaaccaattataattggtcgtcatgctcatgctgatcaatataaagcaactgattttgttgttcctgaagctggtactttagaattaactttcactccaaaagattcaaatagttcaaataaaattactcgtaccgtttataattataatgattctggtgttgcattagcaatgtataatactgatgaatcaattagaggttttgctcattcttcttttaaaatggctttaaatagaaatgctcctcttttcttatcaactaaaaatacaattttaaaaaaatatgatggtagatttaaagatattttccaagaaatttatgaatctgattataaattaaaattcgaagaaaaaggtttaacttatgaacatagattaattgatgatatggttgctcaaatgcttaaatctcaaggtggtttcgttttagctttaaaaaattatgatggtgatgttcaatctgatatagttgctcaaggtttcggttcattaggtttaatgacatctgttttaatgactccagatggtaaagcttttgaatctgaagctgctcatggtactgttacaagacattatagacgttatcaacaaggtgaaaaaacttcaactaattcaattgcttcaatctttgcttggactagaggtatcgctcaaagaggtaaattagataatacacctgaagttatcgaatttgcaaatactttagaaaaatgtgtcttagatactgtttcaaaagatggtataatgactaaagatttagctttattagttaataaaaaagaatatgcagatactgaaggtttcttagatgcagttgctgcaagattatccaaaaccattgaaaattaaattttttacaaactaataatataaccaatctcttttaattatctttgaatgatattaaattataaaacctttctttataaacaatcacctttatatatactccatgtttaattaacgaataaacttttgctatgaatctaatattatactttcttaacgtaatccttaattgcttcctgatcttcttcattttcatattctaataaccaccatatacctttcattgaataaaatgtaccaatcattacactgcaaaatttaataaatggaatcgccaaaactctatagaaataagtatgtggattcaatttattccccacttgttcataatatctttgattactttgcatacgtatcctgatattggggtatactttattgacattgagtctaggtgcttttcttatacggtttaacattgtcgaaaagaaagagatatcgacaaatgttatataactaacccccacaagatcagcggaaatttattttaattttttactatcattccccagttatatacacattaaattatactaattaataaatttttacagttcaatatcaacatcatctctctccataacatcagcaaactcatctgcattcccatattcatttccattatgattatcttgaattggatcttgaaattgtaaattattacttttcgaatcaaatcctaccagtctatgggggcttgttattttaggtgatgcaattagcttctttgatgttaatttttggtcatttgataaccttctaaaccttgatcttctgaaatgtaaagaagtcggagagaatgaagtagatggtgacatcttctctggtaattcaatattccaattcatattgttatcattatttttaattttgttgttttcattagtagttccattatcattgttttcatcctttctgataacgatactagaatttgattcttcccattcttgtatggttgaaatatcatgtctattaggatattccttactaattttcgaaatatttggtgatatatcaaaatctccattgaatacatcatttttttgaggtgttgattccgaatttaaaaataatgatggattagaatagttattagttgtcatatttttggaaattgttaatactcctttattgctatctaatattagtgatgattcaatctctgataatgattcatcctctttcgatgattctaaattgaccctcatcaatttgttatttattgaattaattctattaccttgtctgataaacgaattttgttcttcatcatcattttctgttattttggtattatgtgtacgctttttggaattattcagtattttcatgtttcctccattagtattggttaaatcaatagcttccatttgttgaatgatattatttattaatccattgattaatgcttcacactttactcttgcagtgtcaagattatcaagactagagaaaataacaaggtattgtgcaaatgttttaggcattatacccatatctatactaatattgttatcattaaaccatgaatcaaaaagtatagatgattcttcacctatatgaaattccatttttgttttcaataaatccaactgttttaagtataatacatcatcactttctgaccacccgtctatctctctcaaacgtttatggaacgactcagagtactctaccaataaatcattcagcttggtattttgattcagagaaagtaatgaattttttaaataattgataaatttaagtaaatattctttcaatatagataattgattatagtcttcaagttcaaccaacgtgtcagaaaaatctgtgaattgctttagataaaccaatagcaattttctttttgcaatgttaaatatttgatatgattgtacattttgataattattcagattcttttcaattctttcaatcattatatcaatttgagagtatatatttttcctttgttcattaaatgtattcatctctcttttaacagaaacatccattaaagtttccaattcataaattttcctcttttgatcagatatgattttcatgtaagagccaacatgtttcataactgtggttttattccttactactttagttttaatttccttagccctattagcaaatttaagcgcatttagagtttcgtcataatgtctataacttggggatatacacacaatcatgactgttttacagttcccaccaagtgaaaacttcaataatcttgttagtttagaatttctataaggaatatgatgattcttcctattatcacataatgcattaatacaattacctaaggctaaaagtgatttatttatatttgccccttcatgtaatcgcagacctgtattttttgttgcacttgccctttcactaccggctaaatcaataattgatagaacagatttagtcgagttttccataacatcatttaaaattggagactgtgaaatataaacttgtaaaacggcatgtgatcttgatgatgttaaatttgcctctgtgggagaaacagttctattataattacctctaatgattaaatccataacatcttcaacatttgaaacattatatttagataaattattgactataatttcactattttcatcttctagtaaagttaacttttttgtatttgtttcaatatttagtaaatcaataatattttcattgtaaatttctaaataactaatttgaattgaaatttctctttcattagaattttgagatacataatcaaaaatatctttcaaagccaggaatattatacctgggctttcaggtgtccctgaaattgtaaaagttttaccacaaccagttgcaccatatgcaaaaatagttgaattataaccttgtaaagcagcatcaattgaaggtttagttgcattttcataaatatctgattgagatgaatcttcatcaaaaagacgatcaaaaatgaatttatgttccttgtgtctcttgttatgacgacctattcttggattttcacttgaagaagaatgtggatcgaaaaccaacattctatcatcaacaacatccacaattttcctaagagttgattcatcaggagtcagtggacgtattcgcacggcaacagaaatagaggcttccttggctatggaattcatgtttaaaaagaacaaatgaatataacactgggatacattaatccttataaaagtcaagtcaagtgtttacatttcaaaacgcgatacattaaattttcatgtcaaaacttgaatccctccctaaagcagggcagcaatatagggtataaaattgttatcgatagtatacaatgaacgaacatgataaacattaaaattgatattgggtgttatacagtattatagtgttcattatatacattaatctttattattgtaaaggagcatataaaatttgtgtcacatattttcttttgtatctcactacactagctacagctaaagtgttatgtttaattgatgtagttgcaagatgatttaacacgacatgatttggaatcggaagtgcaccaccagtatttgccttatcattactattataactatttagaataacattttcaagatgtggaggaagttgaggtggaatcagccattgttgtgtatgattaccacgtctttcattattatctaatgtagcataatattcttgcataacagctggatcagtgaaaatagctggaattgatgaaatatattcaactgctgatgatgataatgcctgtgattcatcatagtatcgcgtgtatccatcacccatatcatcatcatctcgcgttagtcctaaccttgaatcaagagttcttaaagaggcacgagacctactcttttcagtagttctctctgaatctttctcagatggccatatttccagataattaacaaaatgacctgaatgatcagttgcagttggaataaaacttgaacatttaacttcattatcaacaacaaacttaaatctatgagtaccgggtggtaacgatatttgtacttgaaaagatccatccttttcatttggtccattaagagcaatcatttttctccaaccagtgaatgtacccataacgaaaactctctcaccaccttcggtccaacggaaaacagtgggcacaagcagtgttggttcaacaggtgcattcatttgaggttctgcatcatccatagatacgtctcgttccatagacatctttatcgttcaatttatatagataaaataatcagacaaaaaaaaaaacaagaagtagtcaatgcagattaccaattgtagacagaattattatcaaaaattaccttagaaattcatcatcaacattcataaactgtagagcgaacaatgaaattgaattacataatcatcttcatatcttcatatcttcaactctaatcagtgtttgtttcttcttttaaaggtcacactactacacatatttcgaaaatatcaatggatccactcgaacaatttgaaataacaaaatcttatctcttggatagacttccaaaagaattatcatctccaaaagtactcattatttgtggttccggtctaggtggtttagcagatcttctcacagacaatgtctcatttgattatgcagacatcccaggtttcaaagcttctcatgttccaggtcataaaggtgcccttgttttcggtcatttaggatctaaatcaactcctgtcatgtgtatggttggaagattccactattatgaaggtcattcatttttttctaatactttaccagttagaatagctaaattattaggtgttacacatcttatagttacaaatgcggcaggtggattgaattcattatataaacctggtgatataatggtgatagatgatcacataaactttccaggtttagcaggtcaacatcctctaagaggtctcaatttggatagttttggtcctcgtttcttacctttatcagatgcttatgattttgatcttcgtttgaaattttttaaaattataaaagagttaggtataacaagaaatgtttatgaaggtacttattgttatgtttcaggtccaacttttgaaacacgtgctgaatgtcgtatgctacaaaccattggtgcagatgctgttggtatgagtaccgttcctgaagttattattgccagacattcaggaataaaagttcttggtttaagtttgattacaaatgccgcagttttcacaaaacctccatctgctaaacaagcattaatcaatggtttagatagtatagttgatcaaactgatggtatggcaagtcatgctgaagttttagaaaatgcaaataatgccgcaactgacttaaagaaattaattgaacattttgtttctaatttagaatagttcatcattaaattttaatttagataaaagacttacagaaataatatttacttgatactttgcatactcggtctttttgtaattcgtctactattgtcaccctcttcaccttttgaagttgtggaaaatgaccgtagcctaccctgagtgttaatctttagcttcataaatgattgctggatacctaaactattggtccctccacttggtttattattttcaatcggttcacctttaatcgcatttctcttaacttctttacgtttcagtaattccttagctcgtaaaaatgcttttacccaagtttcgtttgaattcacacgaaatcccactctaacatttgaatttaatccacccttaacaaacttacttctatcccacgcacttagacaaatcaatttattaatatttgccagttcaagtatcaaataaccttcatgtaattcttcgtcaaattcataatcatataaactaacatttttgttagttaacttcacctcaataattctattataaaaatctctagcttgcatttgtgttgcactttgaggagtatttaaatgaaatccatcatttagttcatatatgaaaactctcgcatgactcgtaatgaccataatacaagatttcaaatttttgtcaagctctcgttcatgtttggttataatgctctcaagtattgaatggttcaatgtctttgcaggattacccttatgagatatctcacttttgaatatattgtccaattttaaaatagtttcttgttgcattaatttgttagttatgacactaggtatttgtttatccatcaatattggatttactagttgttcagggaatttaccactagttctattatgagtaagcatcttaccgatagccccagctgcagcagcagcatcagatgatgcaactctaggttttggtaaaactaattcattcaaacttttattaggtgctatggaaggttttggtttcattttattattcatcattgctgatttttgagcataagataacttcaaatctggagattaaaggcgcttttttaacaacaactttcttttccaatgatgttatgtttttgaacgatgtatgatttattttctgcgcagctggaattgttgatgtttctggtattgttggagttgattgtttcgttataattaccgatttggaagattcaccattcgttagcatcgaactgaatgatgagcctgaatttcttttcaaaaaaatatcatttcttgggggtggttttgatgttgactcatttttaattggtggaggaacagtgataccaacctttgcactgcttggttgttgcatgtaaatttttgttggagtaatatttctaatattttcattgtttttcacaaccatctttccgtttgccgtttggaatatttgattattacttaacttgggagatttcggtttcaaatttgtattgatataatttggctttgttgttgtaatattaaatgaatttgctgactttgaattgattaatctctgccctattgcaaaatctttttcatcaattcgatttgttaggaccttattcatcaaacttgtattattttgagcagttagaagttgctctttaagaatatttttacgtttgttaccaacatttagttcattcaagttaccagaagcttttattgttgtagttggtggagcgttcttttttatcgaaactggagaccctattctttgattggaaattggtgtcatttgcttaagtttaaagtgattttcaggtttataaggttctaatttaggtaccaatccccatatagcattcttatcattccaattaatattttgaaaccatttatgtgattttataccttcaactcccaatcttttattaggatctgcaattaataaacatcttatgagatcaactacatatgaaggtattgggtattttgatggttcagggaatgtataattaacttccacaattttttcaaatgtttcatattcatttgtagccttaaatggtggtctaccaacaaacatttgataaataatacaacctaaagaccaataatcacttgcaaaactcgattgattatactttaataattcaggtgagatatattcagcagttccaacaaatgatccatttgatgatgtagaatcaatatgatcattagatgtaccattcaatttcatttgtacatcgtttatcatcttcataagtagttattatagataaatctgtttctgatgctaaattatcattacaatcataaaactttgcagctccaaaatctgtaatcattaatttccaatctttactaagtaagatgttttctggctttaaatctcgatgtataatccctttatcatgtataaatgcaattgtatctactaattgaacagtatagtaaagtgataattctaaacttaaactacccaatcgatgtattagattgagtaattctccatttgatgcataatcaatgacaaaatataaattctttggatcttgaaatgtatagtaaagagttacaattcctggatgtactcctaacatattcaatgtatttttctcaattgtaacatatttctttttcttttctttatgtatatgttgtttatttaatactttaattgcataagtatgaacatttgttctagatactgcacgataaactttcgaatacgatccttctccaatacattctaaaaattggaaatcagcagccgatcgtttccgagtaaccttcttcatatcttcactattggaataaccattactggctattactgtcccattacgctgtgtcattggacagttgaattagcttagattgatcgtccgacatctacagaaaagcttctgcaatatgcaattatatacccttcgataataaaaaccgtgcgagtcctcctactgtacagaaaatttgaaatcccacaattttcatgtcgcacggggattagttatctaatacccatttccattcctattacatcatcttttttaattcaacttacttgatacgcatgtcagtgtgtatgtggactttgaataaaataataatcatttttattgtaatcacttgactaaactatgtacatgtacgtagactataaataaaaaaataatggaataaactaaactatttaccaaaataactaatcctttttaccttcaacgtcttccccgccctttttgttttctttttcagagtccttttccttactctctggttcaagtttaccctctaaatacttatcgaaagcatcgtttctattaggaaatggtctcttaccaagtaactcaatcatgtcttctctggtaatgacttccttagttaataatctttgagcaactttttcaacttcttcactcttttcactcaataaattacggcaacgatcgtaacattctctaactatacgttgaatttcctcatcaattaaactagcagtcttatcactgaatggtttagtaaaatcattacctctatccatatcataactaactaaaccaacttttggtgataaaccacatcctaaaaccatcttttgtgccatactagtgactttttcaaaatcatcagatgcaccagatgtaactgatgaaaagtgtaattcttcagagacacgtccaccaagtgtcatagtcattctatctaataatttttgtgtggtgtataaataaatatcagctggtaaatattgtgcataaccaagtgcaccttgacctcttggaacaatagaaacttttaataatggatctgcatattctaaataccaaccacaaattgcatgaccggcttcatgataagcaacaactttcttttcatcaacagataataattttgttttcttttctaaaccaccaataactctttcaattgcttgttcaaaatgtttcagttgaacaaaatcttcatcctttcttgcagcaattaacgcagcttcattacaaacgtttgcaatatctgcaccactaaaacctggtgttaaagtagctaatctaccctttaaatcttcaatattactttctggagctaatttaatttgtcttaaatgaactgcaaaaatatcttttctgccatccaattctggattaccaatgtaaattttacgatcaaatcttccaggtcttaataatgctgaatctaaaacatcaactctattagtacctgcaaagacaacaacgtgatcatcagatgtgaaaccatccatttcaactaataattgattaagtgtattttcacgttcatcattaccacccatacctttacctttacctctggacttaccaatcgcatcaatttcatcaacaaaaacaatagaaggtgcgttttctctagctgtcttaaataattcacgaactcttgaagcaccgacaccgacaaacatttcaacaaattcagaaccggaaacagaatagaatggaacaccagcttcaccagcagttgcctttgccattaaagttttacctgtacctggaggaccatttaaaattgcacctcttggaatcttagcaccctaatctttcatacttttcaggatgctttaagaaattaacaaattccatgatttcttcctttgcctcattacatccagcaacatcattaaatgtgattttaacattttcatctgcattaaatttcttaaaagtctttttgttaccaaacagaccaccacccattccacctgaaccagataacatctttttagttgaccagaaaataaaaccaaataataaaacagttggtaagattgcccataaacttttccaaagattggttgagtgaatgtacataacaggaattttcttttcatctggtatattataagtctcttgagctttcttcagtttttcttcaaatttttctaatgaaccaatagtgaagtaatattcaacatttggatcatgatttggttgatttctaccaaattcatttaagataacttgaacagtttcattattaataacaatcaatctatcaacataacctttacttaataacttggtttcaaattcttggaaagtgatttctttatcaaagttttcagaatataatgtataagttaataaagcaccagcaatgatccataataacaatgtatctaatctaaattccatttccaaaaacttagttttgtcatcttgagatcgatgacttctgaattcaaatggttttggatctttaccatcttttggtttctcaacatcaattttaaaaccaaaattcttacccttcttcttaaattcttcctctatttcatccatctttttatcaacttcatctttttcttcctctggattgaatattggatcttcttcattattaaattccatttgtttatgttgatgatagtacattaaagatttatgaaatctttgaacattttcaactttttcaccaggaacttctgcttctgggtcttttaaaattactgcaatcattttacttgcagatggtgagatcaatccacccatttggtatttattaaataattcaatgatttgtttattttcagacttggtagagtcattccaaatagcttttaattcttttaacaattgttgagcttcctcatcactatattctctttcacctcgtgaattgaacttttggtgtggtggttgagatgaattgaatctaacttgaaaattctttttattgactaaattgttattaaatgctctaaagttactaacattttgtcttttattgttaatgtattgataattggtatcatttgaatcttttctgtaatatcttcttttaataccagagcttattggtactaccaaaggcgatgttatttttgaggaaacaacaccgctgttgatcaacggtctgaatccattcagttttgacaacattctttgttcttgtcttgtactagtagcaaagaaaaaagaaaacatcgaatgaagcatcatcaagccagtgttttgccctccctcatgaagaggtttgctcatattaattttctctcttttttcagtcttattattacgtaatgtccactctggccaaagacctaacttcggtcattttcagttactaatcagttttatgataataagtttactataatatacgaaatgctgattatataaatctaatgaaatagaaatcaaaaaattgacgagttttattaaactgtggaaacaatagatgaagcattttgtaaaacatcaaccatctttttacattcctttctacgtgcaacggtgaattcgttttctctaactaaactttccatgtttttatctgcataaagtttttctaataaaactttttgtatatctgcacgacttgtttgaattaatttcaacataatagctttcggcacaacatctgcaactgtacgtttaacaatattgaaataactcgatataagtaatttaatgacttcagtttcaacaacttccttttcactcataccaccactagcctttaagacagcaggtggagcttccattgcagctaacttcttcttattacgtgaactaaagaaacctgagaaaaagccggatttatcatcatcaggaacaacaccagcatttgcactagttgttgcagaacttgagtttgatgaacttgaactatttttgagaggtttaccagtttttggatcaacttgaacagcttgggatggatgtaatttttcattaactaatgaaactgcttcagaaccttttaataaatctggatgagcagtgttaatataacattcttcagaatgaataatatcagcaacaaatgtattagttggtaacataatttccttaatatattcggtaaaaacagaagcaattctatcctttaatgaaggatatctagcaaatgatgattgtgctaaaatttgacttaagattctaattaattcatcataaactaatgtaatacaacgtaatgaagggtcttcaaatcttttaatttgttgtttgactaaaacttcaaatgcggcagtaccaacaaataatgatggggatgaaccggaactattatacataatagttctaatatcagcatcctttatacgatcaaatggatctaatgcataaacaccatttttgaaaacctcatggaaaacaaaactaattctagcaccaccacttaattcatttgatgaaatatcctttgtatgaccatccagaacaccattataatcattacagaaatctgtaatgacacttagaacagttgatgatggagaatcaatagtttctggacctaatgaaactagttcgttttgatatttttttaaagctgtatcaatttttgctctaatatctggtaatgttgctctaatatgacttaaaagaataacattcaatttttttgctaaatatggagtaccacaatattgcgccttagtagaatatgaaggatgattttcaaagaatttagcttcatcagcaagggctgctctaatagttttatgattttcaatatctttttgacctctattaataacaggaacataaccccctcttaaaggaataactctaccagctaaaatatcaataacatcggtaccttgatccatcaaatcaaccttagtcaaaacaccaattgttctaataccttctgggtcaacttctcttgctaattttaaaccatcagaattagctaaatcttgatttgctgcattaacagctaaaatgattgcatttggtttagaaataaatttcatgatcatatctctaatttgcctttcaatatcaactggttgatcaccaactggcactttagttaaacctggtaaatcaaccaaagttaaagttaaaacatgaggagaataaattcttaaattgattggaactggtgaaataccggcatttttaccagcagttgtatcagttgccttaataatttcttgacgaatttcatcaaaattataaaattttttaccaggtaaatgtaagaattcaccccattcatcggcattattttcagttttttgacctttatcatcatgtgtctgtaaatctaataaatcggaatgtgcattagttgaagcagatcttgcaggtcttctattaaacaattgtaaaatcaatggtcttctagtgacaatacctgtacctcttggtaagaattctctaccaacaatgttttccaaaacggaagatttacctgaagattgtgaaccaacaacagtaatttgaggaagatcaattggagaagatgaaccgcctcccaatggtgccaaagcatcctgaagcttgttaatagtagtaattaaatgctcatccatagtatgcgtatttaaatgagtatatgatggagatagatataaatcaaacaacacaatgatttgccatcaattattcgtttacccatgtgtaacttactctctgtactatttttcttacctggcacaaattggtggctgagaattgtgagaagtaacatttccccaatttcttcaattggcaaaaagcgcagacgcatcgacccaaccgagagagagaataaaacttttttttccatttctcttatcttatcttaaaactgttcactttaaaaaattcttatctttggaaattctcacatgtcatcgtcgaaattgttatctttttcactgaatttttcattagctatatatcacttatcaagtatattctccacatgattcttgtctataaaccacacttgacaacaccttattttctcttataatttctatcatttattataaatattaccattcccaattctataatcacatcacttcatatatcttagagattaaatactacatacaatcacaaaaatctctttcacttaagaaccatttgatcttatttcatttaactaaaaaaaacgccacatttaatgattgaccttaatctaatattaccatacacacttcttacaattgtaataccaacaattgatcttattttactatgtttcctttctcaaaaatctaatatattcactgatgtgtacttcttcacaaacttaataaactttttgatagtgttttattatatcaaaaaatactgaactacccagccacactaaactatttgctatattttcaattttgatatattcattttaatctattctactaaaaagaataaaaatgacacaattaacaacttaccaaatacatctctatcttcattacatttatccactgatgaaacaactccaattatttcctcaaatagtgaaataaattatcaaacttttaaaaaaactttacaaccaaaaagaagtatagaaacttctttaatcaaccatattgcttcctctttaatgaattcaccacaatctgttagaagtaatgcacaagtttccaagaaatcccttgatctactattattcaaaattgatgatgtaatgtctcctgcaacaaatgttcccgtacgatccaatcacaaaaaaggttttgaagctaatcctattgatgttattgatgatgatatagaaacaattgatattacaaaaccatcaaaagaacaagaaaggcattgctccaaaaaatcttttaacacttcaccaatactatcaactttaatggctctttcaacacctgcagatgctttgcctatcaatatcaacaaagaaaatgattctaaagtaaatataccaatcacagaatcatattttatattgataccttttgtattatacttttcaattactttgttgaataccaggtttaccattcatgacataaatgaagatagtgataataactataacttcttacatcttacaaaattgagtttgattttaatttcttggattctattttcttacagcgtttacttatattccactgttcaaacagagataaaaatcctactctacattcaaacaatagctacatttatttctttctctctatgtgtgttgaagcttttcagaaataaattatcgactgaaaagtttataccacttcaaataactacatgaatactttattcctatttacaatataatatacccctttagaaaaactttctgtgatgctgtgtttactcttttatttgctttttacattccttcattttgaaatcaacctttttcttatataacagttatatttaaaaacttccatgttttggaaccattcgtcccattgtatttatagaaaaaaaaaatatctaccaatattatcaattatttactatttctttcagtgaccactctccgctatctaatggacatgaatttctagttttaatccaggtggatatacaatgtaaatgaaaactatgattacatgtaccaatagctcttggacattttatttgttcactattacctggttgttctgctttaccttgacaatcaatacatggctccattaaatgattacgacaaattgcacatgtttcattagtttgatcccatgaccaaaaggcaactgctgtccatttctttatttcaaatcttttcttctttggtttttcttttttggttgtatctgtactagacccctctatttggttctctaaaggtgcatctgtattatcagtatccattggttcagacatgtttggctctttatcttcaagataaacttacccaacttcagaagcaaaggcgcaaaattaatgttgatgaaatttcgtgaagcttgtaataaaaaaataaaccatgcatgcttcatgaaaaatcaacaaaacgttattactgttattttaagctcattcttgtttactataggtaaacgtcatggataatcccgatattgcatctttatatccaccacctccaccgtattataaattttttaccaaagagaatgtttcaaaatacatacagttgaaagctgatggagaaaccgatgaatctataagtgagatggtgaatcttaaatttctggtaccacctaaacaaccaaacaaagagcaatatagaagttttggtgaattatggtggttcaaagataaaaatgtcggcttaaaagaaagtggaattgaacaaatttatggtgatactatactaaaaccagcatcggatgatgtttcaaaagataatgaagatgtcaatgaggaagaagatgaagaagttttttctaagacacgtattgaagaacttaaaaaaatgacaaaatcagttttattaaactttcttgaactggtgggtgtgatagctgaaaatccagaacaagctgcaaagaaaattgaacatattcgtaccattttgatcaatatccatcatttattaaattcttacagggttcatcaaagtcgagagactttgatactaagattgcaagaaaagatatcacaaacacaggatgaaatcgacaatataaatgaaacctgtgaaatggttgaaaccaaaatgaaagatattttagcacatatcgatggcttacaattaaagactaaagaacaagaaaaaataagtcccccaataaatccaatacccaattagataaacattcgttataaatttatgtacaagttttatataacattaaaaaaagattaatttagaaatctcttatttagactctatgtctgattctggttcagggatattaccgattatattagagaaaccagtaaattcaacactcatatcgtcatccacacccattccatagtcaaaaacaccaccaatcattgaattatataaattttcatcttcaagtgtccatttctcttcgacgcctattgttttaagttgtctcacaagaccattaattatgaaggaacgttccaataaatttctttcgtatggatcaacactaccatcaggtaacatgttttgaataataaaagtacgtgcattaggatcaaatttttccgagtttgtattactatcgaagcctgatgcaaacattgaaaactctttctcgggcactataccatcaacatttcttgctcttcccattatcatggctaagtttgaaggtgttttaatagcatctgtacctaatataaatattgttttaagaccagctaatgtaacacctagaagagatgatgtatttgtgacatatagatcgatatcatcctcagttttggttgatttatcaacaaattgtgtagagtgttttcttacatccaacactgcaatttttctcttagttttcttggataatttttcaacaatagagttagaattcagttcatctgaatgtactacaattgcaggtttttccatctttcatccaatctaaaacatcttgtttctttaatagtttgcctaatcctgaacataatatttcaatttctcccattttgacttcttgtggaattgaagaccattttgtatttctatgttttctatatgcctccgaatttccatatgaagttctataaactttgtttaaccactctctaggggtttctccatattcaaatggtttcatatcatacaaggtaactttaaatttgtcagaagtttcattcttaaatctagggagaacaagtactgtactaactgcaactttgtcactgatatatttgtaatgtggaacatcttcttcatctccaaatttaccgattggtgcaaatttcttccaatctatccattttgtatactcttttaattgttgaattaatgaatctgttgctgcatcattagttgttaaaataacttgaggatgtgggcaattatgcatacgtctataatcttgaagttttaaaacataattcatgagtttaacaaccggtgcttctttcttagtttctaacatcaatgtttcgtcaatcatagaggtgaaatcatcaactgcaatatatgataatgaatttattttcacaaaatccatacccttactactcaaaatatctaataatctttgtggagtagctaccaaaacatgaggtgcttgaaaatctgttaaatcatcttcttgttgtaattcttcctcaggagttgatctatataaaaattgaacaatatttttaggattgacttgttgatccgttcgtaaattagatattataccattgacaacattttgatattgagtgacaagcgagtttgatttgacaagaattaaaggaatttatacctttacctttgatattcattctacgtaaattcaatgcagataataacagtgaaaatgatttaccacaacctgacggcccttttgctacggtactaccataaccgctcattaaggcgaaaaatctttgttcaaaattggttaatggaaaatcagcataactttcctttgaataagaaacatgtcttcttttcgacaaatatcgaacaattgcagtactcagtggataatcaaaaccaacattaaaccaattcaaatctttatcaaggtttaactttatacgttgatctatgggaagaagatgtttcttattgtaagattcaataacatgcatgttttttgtaatgtattcatctattggagttttaagacctttgtcaacttgattatatgctttacggtatttcgttctccaatactttggtccaattgatggagtttggttattatcattttttttatttaaaccatttttttgaaattttgctagacttgatgtctttctatatgatggttcatctcctgagttggtatttgagccataatcttcttcagggtcttcgtttaatatatcatttaataatttttcatctgattggaatctttgtagaaaagttacattttttattagtatatcgtattaaaaaattgtacaatatggaattgtttgcggtggtcactttgaccattcccatttaactaaatatcttatcttttttatctgctgtgtgtatatgtttagtagaaatctaacttaaaattcttattcagcatgtaaaaaaaataaatacatgaaaaaaaaatttcaaatgtcacataaaatactgtcgcgacgccgttaaaagatttctttccaggtttattttcttcaattaaactcttttaccattttgacactgtaaatattgaaagaacttttgcagtttagccataattcattatacaacaaacatgcttagaatatcaacaagacaaactgtctcagctttgtttaaagccagaactcaaactaatatcactaaatgtttcactacattccaatcattacgtcaggaggatgaatcaaacaaacatggtcattctcataatggtgtaccatgtggtggacacagtcatagtcacaatcattcaccatctcattcacattctcactcccactcaaatgatggaaatgttgcacgtgtcaagatggataaaccaatgttaatgttagctttcacatgtaagaaatgtgacaccagatcttcacacgttatttcaaaacaagcatatgaaggtggtacaattctagtacaatgtccaggttgtaaatcaagacatttagttgcagatcatttgaaaattttttctgacaatagaatcaaacttgaagatatattaaaggcacaaggtgaaggtattcaaactggtactgaagatcttatctttgatgatatcccagaatcattaagatcacttataggacaccatgcaaaggatgcacctgctgagtttcaaaagaaaaataaattaccagaagagccaccaaagattgcagatgattccaaaaattaaaataaatgaaatgggcaattttcctgaaataaataaatattaaaacttgtatataaacaaattaagttagttgcattaatataatttatcatcattatccttactttatttcataagtaactcttctttgctgttgatcattaaaacaatgcctccaagatccagatatataccgcaatcagcatcttcaaccataaacacggatatgttctccttgaataacaaaaaaaagcaatcaaattggttaaacaaaacatgctttgttgataagtatcaactattgtggtttatagctcatgttaatacacttttgggatttgtgatgtatgtaacttgtttatcaaatccaggaaagaaatttttagaaattatgtcttggtacaaaatcactaatatcagttgtattttaacatattcaattgtaatacataaacgttatttatgtgatgatagcattgaaagaattgaagctggtaataacatattcatcagttacatattaaaaactgagaatgctcaattaatcatttcagctattctttggtcagtaacagaagaatcgatatttaagttgattccatttgtaatatattcaattttgaatatatcttgcttttttgtttttgatgcatatccaaaagaaactttctccgttgctcttgcaccatttatttgttacataaaggatccaagtttagtattttcagcatttaatgatgttgcagttattggtattttgttaaatgaatcatactatagtaattcctattatgctttctttctttatgttttcatttggggtttgaaagttgaaaactccgaagcaagtagaattgctctttacaaaattgtccaattctttgatacaatacttacaaattcatatgttcccttgaagttaagattaggttggagccacgctaagaatcaaatttgtcaagttttatcatatcctgatatctgtaaatcatctgaaaaagctgcctttcagactgatgatttgaaagtagaagagaaagtcgtatactaatcaattgtatttttatgtgttttataaaatctatgtattatacaataagataatatcggattaatattattttccatcaccaactatgaattcataatttctagttttaactcttgtagagcctcaaaaccatcagtatattcccaactagatttacccttagatattaaacttctaatagtactcttagccttaaatttccaatccttacaaacaacatcacctgctccgtgtcttccttctaattcaccgaagttttcataagctgaaaccaattcttgacatgcttcgacagcaattttccacacattttcatcagacgttaaatccggattatttataacagctctataagatttttcataatcttctaatgctaaccaaggtttctttctccaaaaatcaactttggcaacgattctccaaatacgagaatcactattgaccacacttggaatcatgttacaaatgaaatcagtcgcggttttttggaaatatgtttctcttttatttgcatcgaaaggttcagaagttaataaatcagcaattttttcaacaattggtatatctattgatgttgtactatgatctaaatctttcttatcattcaataaaactatagatgcatgtaaaacttcatcccatttacctaatttcacagcaactatcaaatagttttcccaaattttccatgatttctttgtagaatcaccagagttgacggatttttgtaatgcagtgaatgcttctgaaattttatcgagttgaattaaagctgatgcaagattggaccaagcataagagtttgaatcgtccaatgaaacacatcttgtgaatgcttctgctgcaagttcataattaccaacttctaaacccatacaaccatagaagtaccaattttgaaagttgattggatttgcagataaacagtcaaacatatggctgatagctgtttgtaaatttttttcaacattagaatcctttggtggattactgtaaaacttagccaaacttctttttgcatttgcatatcttccaatactccatgctttttcccataaacttggatcactcttaatatcacctaaaacagaccatgatctagcatcattaggattatattgtaaagctttttcaacaagttctacacctttatcagagtcaccagttgcggcataacataaagcagcatctgtccatttctctaatctttcgtatatttcaagagcactctttaatgatcccaattccatcaatttttcagctaacttagtatccattgaccattttggcattaatggtaaagtataaatataccttaatctagtggcattagttaatgctacagtaatatcggttgaattcctaaactcagttggaaacttgacttcatcatcagtttttggaaataatctagcagtgtgttcacttgtgacacctaattcttcgactaaagaatataattgtaaaacacctctttcaacggtacgtgatctagcagtttctaataaagaacgataccataatgctctagagaaaattaaccagtttacatattcagaagatgaaaataaaactctttgaataacagcgattaattcttcattaacaagagtatttccatctggtgtgttgttgtatatagcttgcattcttaataaaagttgaatattatcgagattagccaaggtgggttggtcattagggtcaatattatttaattcagcagggatatccgattcttttactgctattggaattaattttttatcaatagttgttggaatttcatcattcatagttgagtaatcaatttttattcttttagtaaagtcattttcaatatttgtttcttcatcttttaagatttcattatcacctaaggaatcaaaatttggtttttctaaaaataaatcatcatttaattgaacatcttgtggtttgaaacttttctcagactcttctgaagataataatgtattggatgattttgctagaactgttaaagttgcagttgatttagtttgatgtttagtcattcttgccttacaaccggttaatatcaaggacatacatgatgctttatttgcatttaaaataaaatccaatgtttgtacttccaaatctccagcaattgaaatatttgcgttttctaaatagtaactgataagaagatattgattagctttggaatttacgttaacagtatcaataagtgcattgactgtttttttacctaataactctaatgataatgtaataatttctgatgaaatctcaggtaaaatagattgttgaacttgtaaggcacgagctctccaccaacaaatagatgcattaatatatgcaccctggttttgttcggataaaaagttaacatcaaaagagttttcaataacaaagcttgaatctaatttgtttttttctgaacctaagagagaaatggatgttccttgtagtctttcaaacatatgtaatgataaaacaagaaaaaatggtgtttctgaaaggtgatatggtgagtaaccgctgatactcaataaatctaatgattgagtttggaaattgaatttaaatttggtgttagtattagttgttgtgaaaagaagacccatgaaaccaatttctttatcagataattcaaatggtaattttggacctgaaaaattagcaacaacaaaaaattgtaagaaaaggatagcaatactcaatgtataaattttcttgtgttcttcagatatagcacaactattaatattttgtttgagaatatcagtgagagtattgatgtaagtgagtaaatcttcaccatttgaagatacatagttttgagttgcagttaagatatcgttattttgaaagaatatttcggaaaataatttggattgaagcagttgaaagtagtgaccattgactattgcaaggacatggttttggatttgttcgtctacttcctcatgattgttatcaaattctattttagggttttgaagaacaagttttgccaagagggtcttcaaagacatgttttgtttttaaatgagtttatttggggataaaagagttggacttttaagagtctggattagaaaagaaaaaaatatcattttcatgaaactttttcaacatcagtagtgtgaacttcacagtggaaaaaaaaaatggggctcagcatttaaaggtcacgtgtagtgtattttgagtcctctcaagagaagaagagtgtctacttgaagacctttctttcatactagtcgttagatactccttaatgtaatgaactctctcacaaagtttgtaacagtgatggtcatttaaagaaaaaaatacagtgaatagtttgaaattaaaaagatgggtttaggtttttatacagtaaaatcatacaattttaatcaaatttaagatccatgagaccttcacaatctttaaccatgtatggataccagaaaatagttggccaaatggtaacaaaatgccacatagcatgagcgtcaatcaggtcaaaaactggtggaaaatcaaataattcaaatgacataccaaaaataacactggtgactaataatattggtgttaaagtccaattaatttctttacttttgatattatcaatcaagctgagatgtttattacgtacttttttgaattgtgaaactgatagagttacccataatatgttttgaataataccaacaacaacatttgcagccatattgtatgtatatgaccaatcatttaataattttgtaacatgagtcaagtacatgaaaatacatgaaacagcaagtaataatcttttaaactgattttgtgttttgtataagctaaaaaatctaacattgattgcgtaaaatccagttaaaacagtcaaacctgcaaagaaataatctaatctctccctgttccaagtatcttttaaatggaaaatagtagaaaaaaaccaagcacacattgatgcaacagcaacaagagcatatgaaaaatacaaatttgcaatttcattattacctctttcacgttgtaatttataatgtttagataataatttaaatccccagtagtttggaataaagttaccaatactgaaaagtgcactaaaaagttcctgaataccaaaaactctgataaatggccacttaccatggaattggtgaatttctttgtcagtcttcaactctatctattgtaatcagtctttgacattgataatcacaatttgattcacatgaccaacctagggcttttaaatgtaaaccaagtggcattttatcgaataaactgattaattcttcatctttcatcaagtttttataagcttcctgggatatttgtgatttgtggtagttttgaatcttcacatgagataataatacaatattgtaaacatttctgaaattctggtaattcatcaccaagagaagcaaccgttagtctagtcaatgatagcactgaaaaaaatagtgtgacaattgatgtgatactagtcatacctctctgctataccaattcaatgcctttaaattaaaagaatgaagttgtttaattgaggcatgaagaaaaagatggtaatttcggcaagacaaattttcaagctaacccgttaaagtataggatctttaatcttttcaccttgtttccaatatatgcacaatgagtcgtcatcagctggacctagtagtgtgtcagagactacctggaacaaaaattggtcttctttgccctaaatgtgatggtagatgtccaacatgcgattcttacgtgaattctaaaagaaaagtacatatttgtgatgagtgtgcatttggttcaatgggtgaatgctgtatcatttgtggaagtacggcgaggccaggagaaacaatgaatgaagcctactattgttctcaatgttgtttgttagagagagatagagatggatgtcctaaagtccttaatatcggtggtttacgttcagactattattatcagcaaaagaaaaagaagatagaaactcttaaataataagattgggtcgttaatttataaataattatatcatcaaaatataaagtgataaagaaatgagtttattgcattattgccatcaataatgctagttgttagtcttggattccgtaatattgttatgagaatagtgttgtagacgtctcaaaattaactctaatgttttagacttacatttttcataccataaccattctaatttgatagctaatattttcgcagttgataaaagctcttctgtggtctttttttgtaatggtgtagttatcagcagttgtttgacactatataaatgttctaataaatcattttgatcatctgtatttttatcaaacataaattttgaatcatgactatccaatgaagaaattgtacttgatgatgatagaatataatttttagaagagattgatgcaacttctgatgattgttgacggttattaaatacttcaacgttatttgtggagtgtcttgaaatttcattgataatatcatccactgtattcatactcagatttgcgttttcgaaagcatcaacaagttcgtgatcactatcttctgagccactgatcgcaccggatacatctttattaaaattcaatgaatgaactggagttattgtattcatatctgaaactgaatgtttggtgtgatctaaaacagtggtattacttctaattcttgtttgattaatattttctgattgtttcttttgaggagatctttcattttccaagctggtatatttatattcatgttccttaattttcatactttttatctttctgttaatagaaactgtaccaactggtacaacttcgtaatattttggttcatcatgtgctcctgaaaatacgtcaagtctattcctgggtatcgagtgataatctaagggttgttgtttcatttttatttttgataatgagctcattatgtttatactgtatatccaggattttacatctactaatgatgaaaccatgtatagattcttaaagtttttgccataaataaagaacgtgtattttgcaaactttgagttgttgtctttggacttcttagatgaacttctcttctgtactttaatagtatcgttttcatttttgtgaacatccttttcatttagttctgtaggagatgatattgaagtgttgataattctatcatattctaaattctggatttttctagtagcaaaggaatctgatccaataatgaatgcaggtaaattgtttttagtttgtactgtttctttttctgatttactaaaatatggaaacgtcataaatgtagaagaatctgtatttgatgaattaggtgaaatgctatcctttaaatcttcaataataacggttttggtattatcttctggactaataccacaaaacctcatcctaaattgtgaaacaccctcaaagaagaacataccaaccgttgttaagatacagaaatatggtttccaaattttattttgattactcttattcttagttttatcattttgaatatgatcatttaatgaagttttattctcaatgtcagtaatattagtaatatcatttgaaacaggttcaggtacgggtatagttgttactggtggagtagatgaaatttcctgtttatcaattattccaatttttataacacgagtaagataatattcttctatgcttgtcgatgcatttagtggtttgactatggtatcaaaagaattcaaatattgacctttattctttggaatcttcaatgtgaattctacattacttttagtaagtgtattccagatttttataagtgttgcagagtctatttcttcctcaatttgtttggagtaatcatccaattgattatttatcatttcaatagatggagtctcaaaatcatctccattataaatgtgatcattacttgctggtaaaaatgggtttaaacagttgagttttatgtcattatcttttactttaaatagcttgagctgattcatataactaatgtcattcttaataatggtatcataaggatctatcatggtggggccactccataaaaatgaagtactcttttttcttacaactgctggagaagagatggaatattgaggtgttgattttgtcaatgatgcggatgattgattggagataggaccacttataataaagtttctgttgttatcattagcagcacatttagagtaggaatgaccgttcaaaaaagttgtatttggatatggaaataataatgatcccttggattgcaaagctaataatgaaagttcactttgttcaggtaagattttaataagcggtgtataagtaatattatcaaataaataacccaataattctttaactattaaagtagtcaactgactgtatcttggtccattattattatcttcaatagcgtctaagacattttgaataaactcgaatcttgtcatttttcttttattatttggattaaatttatctgtgtgtaccataattaaagaatatgtcaagatataaacattatcctctgttaatcctagatctgagttacaattgtaataacgttttgcaaactgataaatcaaacgatcaatttgttgagtttctttgggtaaataatttagcattaaaaattttctaagtgaaaaatctaaaggttcgtgtttgaagtcgtaatatgtttctaaataatattctaatgaacgtctagctaaatcattatcttccaatgatagaatttcagatattgaggtaagtgggtatattttaagtaatttgttaatgaactgttcaggtgtctcatcttctgaaatattcaaatttttcattttagatggtgcagtcggaggttgatgcgtatgcaaagaggcagtagagctagatgatgagtttgagtgtcttaatgtagatgaagttgctgaattactgttgattttaacaaaattagttattgatgatagtaacccggtgttacttcctgctaaatcaattaatggattgtcgatggtatccatagttttcgatctttgtcttagatgtgagttactaactctattatgcttgatatttcttcttgattctaactcctctttcaatggtttatttggagatatagtatttttactatttaatctcatagtattgaaataagcctgttgactttttgaaggtaatgagtcgtctagattaacatatgaaatgatttctcttctttcagcatcagtatatgaaattgatcttctaataacaggtagctcgttttctagtgagtaattttcagaatcatcagaacatcttgaagttgatgtaattgtactatgagaatccataaagaaaattgatttagtggtacgtttgagcatgttcaatgattttccaatagtacttttctctgatggtgttgaggagctaaaacttgaatttctattcaaatctgaagaatttaaaggaggttgaattggtgatgaaggtttaatacttaaagtattgttcatggatgagcgttcgggggataatggcacatcaggtatattattaaattctctcttagtgggagactgaatgattgggataattgacgagttacttgaaattctattttttgagtttttgctttttggaatgtttataaatgaatgatctgataatggcgtgtcggtttgattagaaatggaagacattgaagagaaacgtttaggaatcaaagatgaagaactaattgataatcttttcacattcttctgtaattttgattgtttactttcacctatattagttttctttgataatagtttgctatccattgaatcgacagtagtggtttttagtttccttgaaggtagccaacttgtcgaatttttgagtttcgttgacattttcttttgtttgacattttggtattcaatatcatcactatcgttatcatcattctccaatgaattgacctccgaaatttccgataaatgtcgtgaaatggatagttcagatatgtttgctggtattgaattttgttgaacaccaacatcattgcgaattccacgatgtccttctttcaatgacatagtttcaatgtttatataactcaatcggtacttctaaagctctattatatgtaaaaagagtctgttaaaagatagatgtatgcttgttgtatgcagaagtatgcaattctatacgaaacagcagaaaaatgcggagactaatcgtgtacactgcgggaaaaagttgtgctgatgaaatttcaaagggattgagactaaaaattgatcggactgagctgtttatttcatgcatgtacattgagataattacctaattttcgtatatcatcgtataaacacagttctttttttcttgattcccttttaattgagcattgagtggttatcagagatgtcgcatccttataaatcaattgtaggatccaatgaacatcacaggaaacatgttaatcatcaaatacagaggaaaatacagctttcagctgttgaggagcattatttgaagaaaatgattataaagcaacaattagaggctgaaatcaattccctgtcaccggaatacaatgatagatcaggattacgtcgatttggtccaccatttgtaccagcagatccaaaattattattaaatgattcagatacttcaacattagaacagatctacgcaatgtctgaactaagtatagatgtattccgtcaacaattcccattattaagatttatatttgataattttattgtaacattcccatttatcaagattcatttgagtaagatgggtaatacatatcttgaacaatctaaattctggttgaaaatacaaatgttatttgagttgtttaaaagtaaaaagattagtaattccaatgatagaggttcaacaagtaaacgaagtatgattgtcaggaaatttcaaggtttattcctttcattattcaattctgcaatttattgtaaacaagatgctgaatatttccagatggataaagaaagaagaggtgcatctaagaaattaagtaaatttactgggtctgaagaaacagaagaatcctcaaaggataaagaattgaaaacatttatagaattagagaatgatatgaaggactcatcatacttattagagaaaagtgtaagcacgtcaacacttttagatcatattgatgaaatcaatgatgatgattatattaacggttattacatcaatattattggagtttccgttgaaagtgagacaaaatctacattttggggtgctaaagagggtaagtattatactttcataatacatatcaagcttccgaatgaaagagggtactttatcaaaagaagatactctgattttgagcaattgtataaagatttaaaaacaaaccatccaggaattaaaattccagaattgccatctaaagataaacataatgttgaaatgagtaaaggtacaaatattgactcaaatagtaaactggataatgaagaatataaaaatttacatgaattagattcagaatttgcagatatggataaagaatcattagacgaactattccaaaactcattcaataacaatgttccaaagattgtagaaccactaagtccaccaccaactaaaagtatttttggtaaaccaaataagttaaaatcgccacttggatcaccaattttgtcatccccaagaaagagttccggtaaaaaggagaattcattcttgagtaattttaaaaaaccgtggactggaagtaatggtagtaatggaggaacattgacacctggatcaccaatgtctgtctcttcatcaagctcatcaatgagtcataaacgtaatggatcatttggatccactaattcaattgattctatagacactgcagattcaaatgatacatactattctgcaaatgcatcagctaactcatccaacactgatgaaaaaatggtattcccacgtgaaatattaagacaatcattaagagggtttctaaaatacacattattcattaaaacatgttcagaaagtaaagaaatcaagaaattttttcaagatgataaaattgaattaacaacaaaggaaatacatgatattcaacatagaatcaattttgatcatttacgtaaattacaacattataaatttcaaaatgcattgtctaatattgttacagttctagagaaggatgttgaacaattaaaaattgaaatttataatgaaggatttggatatatttttgatagaattaagaaatataacacactaagagaattatgtggatatgattatgaaaggggtaatggaacatggttggaaagagcatatgagaccaatgctactgttgataatactgatgatattgaaattgataaatcatataaaccattaagaggtcttattagagttattttactagaaatagcaagtacgcaatatgaaatgttaattggaaatgatagtgcaatgagtactttgaaaactgttaagaaattacactcgattttcccatatagaattattgccggagttttaagattcactaatccattaatgatggttaagagaatgattgatatcttcacatatcaaatgccaaccatgtcaggaatgactggaggtagtgtaaatgcaataagtaatggattaagtggtatgatgcaaggattaggattgaagaagaaattgggaagagaagatcttgttgaaaatattccaaatagttcaagtagtactaataagggtaaatcattattacaaatgatattttctagtatgattggtgatgatttaaggaaacttgaaaaagggatcattgaagttagtgatttattgaagtcgtttaatgataacgacgaatcatcatatggaaatggagaattgataattcaaagaattgatgaatattttaagagtgatgatgatgttgtattaggtattaagaaaatcagtacaacatgtggaattgatctacctatgagtattttaatgccaaataatggattaaagagtgaagaattgaatattaaatttgttgagaaattattaaatgaatgtcaaaatgataaagaaattgatgatgttacaatgtataaattaggcaaaagatattttttcacccaattaaggaaatatgataaagaaagtttaattgagttatgggaagaaccagaattagttgaagttattaaagaggtaattgcaatgtttttatcaccattaattgaagttttcaaaaaagctgaagtttacaaatatgtaccaatatttgcacattatatgagtgaattaattgaaatttgtgaaacgtatggatatgactatggtacttttacgcgtagtgatatagttggatcattagttaaattagaagaaaagtattctgaggatgtttataaatttttaagagacatttacaccaatgatactaatggacaattatttgaaggtataattgaatggttaaataagattacacaagttttaaagaatggtaagcgtggtgaagttattgatgttgtcaaaattataaatgatagtgagataagtgttgaagacaagagaaatatattacataatatacaattagcggttactaaatctgaaaagaagaagaaagcattagagaaagcggagaaagagggtggagaaaaaaatgatgaagttaaaggtaatattgagaatattgataatgattggttaaaaatgggtagagatagagcaattgataaaagatgggacgagattcataatagagtatttgatgttggagcagcagtagcaggcgattgggatgatataggagatggattaagcgagaatgaagatgattacagtgatactgcaagtgaagatggtgatactgataaagatggacttgctaccaataaattgaatgaatgtagcaatgtgagtgaattcatcactaaatacatgaaaagcgggattgttactaataataccagcagcactgtcaaggagatatcaaagaagggaattattccagtggtggtgacgaaagagttcactaaatgtacgcttgaacttcttccatgataattatgtgtctatgaaagttgtatctatccgcgatgttaataccggttatgaaaaactgttaattactccaggcaagattggcaatgcttcaactgataagatgtatttcttatagtcattattatctaatcttaaagagagcaggtctatggtttatactctattatctacatttaattcgtaaatttgtactcaaacacttatttcattcacttttttttctcatctaataaatccttatttagtcaacccagagcgccaaacaattttcgtcaaacgttgaaattttttttttcgttatcacaaaataccgtgccgaaattttctacatcacaaagcaactccaacgacaatgagttcctatcaccacaggcgacacgtataaaggctcgtagaaaatatagtgttctcttaaagacacagtgttaaccttcaaatattttcatgttttaagacactttataaaatatctgctttttccccttttatctttaattcgtcagtacaattctgtttcagtactttttaaccacaaatttcaatttattgatatcgtagttatataatagcactgattattaaggaaatacaatgatataggaaatggattaagtggtgatgctgatcgatatgcagttgctaccattaaaccgaacaccgccacaaacccaaccacacacacatcaaagtggcggtgcagctaattatgcgcgcttgactcggacccctcctcctccttctctctgaaatctctctcaaagcttcactgtcactatctatccgcggtgtcactgtttctatacactattaacagcaatatgctgaagtaatggccgtcttttaactgataagatattctaatcataaatcgacgatacatcgttggtttatattaatacatcatcgataaattatatgttattcctttctatttaaacacttcaccattccctccacctttgtattttaggttattagtataaaaaaagtttctttaatttagtacaccctaagcggcaagtaaattaccacttttctttttttcccaaacattgaaaaaaaaaattttttttgtcgaaatcataataaaacattgacctgatttctcaacatcgttctgttttctcttaaaatgactttacaatttcttcgttccccaatgagcaattccagcaataatgatttcctatcaccaagggcatcactaatgaataaggtgtcatcatttcacgataatgataaatatgtaaataaatatcatcctgattatgtcccaggtactgcaaatattcttttagaaaaaattgatggtaaaattgaagattcaactataaaaactaccgcttctggtatcatcttacaccctcaaccaactgaatctccaaatgatcctcttaattggtcagtaatgacaaaaacttatcaatttgcaatcttaatttttattactgctttcaccgctgcaacttcaaatgatgctggttcagttcaagattcaatgaacgaaatttatgatatttcatatgattcaatgaatacaggtgctggtgttctttttgcttcaatagggctttgtacttatttcctcggtccttcagcttctttatatggtagaaaacttacttatttcatctgtatcatattaggtttagttggtgctgcttggtttggtgctgcaaaaagtacaactgatactatatggtctcaattatttgttggtgcttctgaaggttgtgctgaagcatgtgttcaattatccatctctgatatgttttatgcacatcaattaagttgggctcttactctctatattttagctacctcttgtggtacttatttaggtcctcttattgcaggttttattgtggaatatgcaacatttagatgggtcggttggtgtgcggttatcatttctggtggtttattagcatttctcgttttcactcaatatgaaacttattttgatagatctagatatgttccaagagaaactcatttagttgatttagcagctattcctgaagaaaatgaaaatattcaactaaatgatagtgataataaagttgatgcattatcagttgatgaagagaagaaagttgataatgcagaattgaattcagaaacttcaattgatagtttttacatcttaaataacggtgctgatgaaaaaccaaaatcttactggaaaaaaattgcacttattacacctgctacaaatttagaaggttggggtattaaacaatatattgaacgtttaattggtatgttacgtgttttctggttccctccagttgttttatctggtatcctttggggtttacaagatgcatttttaactttctacttaacaactgaagatgatcaatattatgatcctccattcaatttatctgatactggtgttgctttaatgaatattccttgtcttattggttcagttattggttgtttatatgcaggtatcttatctgataaattcgttctttggatggctcgtagaagaaatggtattcaagaagctgaagattatctttactttttagttggtgtatttattgcttgtcctatcggtttaatggttttcgctgcaggtactgatcaactatggggttggagagttacttatgttgtaggtttatcattccttggattctcatttggttgttcaggtgatattgcaatgagttatttaatggctgcttatccagaaatggttattgaaggtatgattggtgtttcattaattaacaattcaattggttgtatttttacattcgtttgttcattatggcttgatgcaatgggtaatacacatacttatgcaattttaactggtattcaagtattagcttgttttgctgctgttcctttcattatttggggtaaaccaatgcgtgcttggactaaaaaatactacctagactttattgaaagaagagatggtgttcatagacatggtgttcatcattgaatattttcactttttaaatacttttcatcatcttattcatttttttatatttctttcatcttcaattcctttgtacaatttttaatcctctttaatataacattataattatctctaataaccgatccaatctccgatttcaaatttcagataataaattttagatatacccaaaatggtaactataagcgcacattttatttctctaatagaacccgccacagtttccttattgatttatgacaatctttcttatcatttgaagacgacgactgtattatcagtattggtaagattgatctgccagtttagtgtattaatgttgagaactacttaatcttgaatatttttcgtttttcaacttcttttcaaactatttcattcttttttggaaacaacgaaaaaatgtcagttcctttatctactaaaattgcattaccaaacggtgaatcatatgaacaaccacttggtttatttattaataatgaaaatgttaaacctgtctcacaaggtgaaaaattaatttcatataatccatcaacaggtgaaccaattactgaagttcattgtgcaacagttgatgatgttaatattgcagttgatgcagcttatgattcaatgaaaagttggaaacatgttgaaccaacagttcgtgttaatttacttattaaacttgcttcattagttgatgaacataaagatacactttcagcgattgaagctttggattcaggtaaaccatttgaatcaaatgcatccgctgatgttcaatcagttgcagattatttaagatattgtgcaggttgggcagataaattacatggtactcaaatcccacttaattcaaaatgtatggcaattacaaaacgtgttccattagttgttggttgtattattccatggaattatccactttcaatggcaagttggaaattttgtcctgctttagcagctggttgtacaattgttatgaaaagtagtgaaattactcctttatctttattatattttgcaaatttagttaaagaagcaggttttccacctggtgtctttaatgttttatcaggttatggtaaagatgttggttctgcattaagtaaacatcataaattagacaagattgcatttactggttcaactgcgacaggtcaaagagttatggcagatgcagcaaattcaaatttgaaaagtatttcattagaatgtggtggtaaatctccattacttgtctttgatgatgctgatttaattgaagctgctaaatgggctagttttggtgttatgtataatacaggtcaaaattgtactgcaaattcaagaattttagttgatgaaaaagttcatgataaatttgttgatattttcattaatcaattaaaggaagattggaaaatgggtgatgtttttaataaagatactagtctgggaccagttgtttctcaacaacaatatgatcgtgttcaaaattatattaaaatcggtgttgaagaaggtgcaactataattcaaccattaaaagatcaaacaccaaacgctggattttttatatctccaactgttttcactaatgttaaagaagatatgagaattgttaaggaagaaatttttggtccagttgttactatttcaaaattcactgatgaaaaagatggtgttgctaaggcaaatgatactatttatggtttagctgcaatgttattttcaaccaactttgaacgtgctaaccgtgttgctgacttattagaagctggtagtgtttatattaatagttctaataatgaagatgttagagttccatttggtggtatgaagatgagtggtattggtagagagttaggtcaagaagcttttaacttatatacagttgttaagagtgtctaccataattatggttctagattataacttttctccctgtaatatcttatattattaaatatacaatctaatagttatgttgtacaaaaaacttcctaatcgggtaattttgaatttccacccacgacatcaaaaaattaaaaattcatgaatcggataattttttgttaattgttgtacctgtaagcaaatattcatacttctttaccttataacctctttctttggacaagtatgttttttgccaagaaagaagaatcagaaccacctaaacgtggaaaacgtgaacaatgttgggcttcaagagatgcttattttgcatgtttagataaacatgatattattaacccattagatccaaaaaatgttaaaactgcaaagaaagaatgtggcagtgaagataaacaatttgaaaaagattgtattgcaagttgggttaaatatttcaaggaaaaacgtccatttgatatcaaaaaggaacgtatgctcaaagaagcagcggaaaatggacaagaaattgttcaaatggaaggataccgtaaataagcaggacgtgcatacacaatgtatttattctctctattaatctttataaaaaatctgtacatataattcaatataagtaataaattaaaactacaataagaactacattgatcaatcttttttaagtgttctttgcttttcagcattttcaacaactttttcatcaacgaataaacctttactttttctaacattattcataactgttctaatccaattttctctatcaccatcagcacctaattcttcaatttcttcttcagttgttggaacccagaacggatcttgttcacaaacttcgaatccatcgaaaactaattgcggaattgcaccaccacttgtacgtttccttatatcctcactaaaaccgaatgatgttaatactggcaattttgcttgaactgtgaaaaatggtgtaccttccttcatttcttcactcaaaatattacctctttgcttttgaataactgtataaactttacctaaaagttcagcacttgtttgaatatcaactgtatacattgccaacatgatacgtggtgatgctttaagtaataaatcatgaatttgatctctaattttggtaagtatcatgtcgttttgagaattttctgattcagttgatgttatttctaaaatttcaactttaacattttgtataggctcattgataattggaccttccttaatagctaatgaaaatccactctttaagtaaccgtccaatgaattattacctgatgaattaataataacatcattatatttttcacttttcagtaatacatcatcgacagattcatctaatggtgaaagtttcattttaattgtatgatcaccaacaatgacatcttcacaaacatattcgagaatggtttctctaaatggaacaattggtttaccaactgtgaaatcaattttagcaaatctatcttttaaatctttaacacatctttccaaatgtaattcacctgcagtttcaagaacaacttcaccttgatcactaacataacctctgacacatggatctgctaaattcaataatttcataccatgtagtaattgattcatttgatttaatttaacaggttctaatgtgactctaacaattggtggaacatcattaattgtattagatgttgcaaaattaattgaatggttagatttaacaatttcaggtgagattattgtacctgatttaagaacaatatttttaaaatctgatgatctgataccaacaattgaacctgcagatatttgatcctattgcagttaaatctcttcccataaatctgtataatttatctattttaatttcatggacatgtggggtatttgattcatcatcataaggtttcgatgtgttatataatggggataacacatataaggtatcatttgtatgtatagtacctgaatagatacgagtaaatgcaattaatgcttctgtatcttcaggtaagtcttcctcttcttcttcctcttgttgatttactacaattggttcatcattcttcttcttcttcgtactcaaattcaagttcaaattcattatctgcatcagcatcttcttcttctttttctgcttctatatcatcttcaaattctaaacctggaacatcagagactgaaaaattagaatctaaatctaactttaattcatccatattaaaacgaatttctctctcttcttccttttcttctccattttcttccttagtttcattatcatcaacatcgtcatttacctttttagctaatttagaagcagcttctgcttctgcatgctctagctaattctgctgcctttgcagctttacctctttcatattcacctctatctctcataactgcttgattttcaggtaattcattcagtggaacagaaatcatttttgaaatataaccacataaaataccatcagcattacaatttattaaatctttatgaagagtttcatcaatttgatcagaatatgggatagaatctaatagtttatccattttattagcttgagcaataacaggtgaaggtaatttatcaataattgtggataaaatagcattagaaattggtaagaattgtgacattattgtacaagtaagtgatttaacatcttttgaatttaacttcctttggagggactttaatattaagtgaggaagttatcttcgtaattgcatcgatatctctatcattgacagagttgtaaattttccaaattgaatctaaaataaaagcaatgaaaaggtttgatctctttgatttaacgacttttttatttttatcaatcatataatctgcaaataatttaccatctaattcagattttggaatacctaattttttagacaatatagcagcaaattgattaagattaaacccccaaccatcataagcacttgtgaagaccacattatttgaatttggatggaaatatatatcatcctctgaagtttcaatccaaggttcatcaccattccaattagaatgagattcaataacatcaccattataaaaggatgccataatagtattagtttgatggattaatttgtttaaatgatcataagcatcagaaggtgataattgtaattctaaaatcaatctatcgattttattaagtactagaattggttttaaattatcaatccaagcttgtcttaaaactgtaattgtctgagagcaaataccttcaacaacatcaactaagactattgcaccatctgataatcttgaaactgatgaaacttctgaactaaaatcaatatgaccaggtgaatcaattaaattaatgaaatactctgaaatttgaccttgttgattaattgatttgaaggataatgaaatagcagatgattccattgtaatacctcttaattgttcatcaggtcttgaatctaagtatcgtaccttacctgccattttctttgaaataataccatttgaagcgattaaagaatctgaaagggttgttttaccatgatcgacatgagctaaaatacagatatttctagtatttgactgcattatttacctgtgagtgtatatagtaaacaatatacaaaagagatctagtatacaatattaacataaaaattttcattcatttcttttcctgtcttataaaagctgcatttgacagtgaaaatattctaccactatcttccatgtgtggcgcagtcgaggaccctctggtatgggaggcgctgtggctggtgtctctgtctctctctttatcaaaacctgttattatattacctccgccctgtaggtacaccgtctctagtttatgaatacgatcatccagtgcatgaagttcatcctctagtgattcttgtttagcggcattagcctttagctgacgtactagttgctttactttatctgattccattgctaaaagaaagtagtgaagtaattgctgtaagaatttcaacgcgaataaccaactattttaaagaaaacaactctttcaacatgttttttagtattttattttcattatatgtttcacttcttgtagataactaacgatgtccgtagtgatagatctcaattcaagtgctgttcatgcaggcttctcatttaaggaatctcctgatgtttcaataaatcctgtttattataataatgatgatccaatatttgatccaattccttcatcttcaacaactactgaaccttatactatttttaatgatggtatactatataatgcatcaattacacctgcatttatacgtcatatctattctcaacttaatgtatcagatgaattattaccattagtaatggcacaaaatgcttggttcgatcgtaaacaattgtccaaattatcagaaattgtatttgaagatcttgaagtaccaattttccaaattcatgaaagacaactatgtacagcttatgcattggctaaacctgatgtttgtcttgttgttgatattgattcagattatgcatcttcaactccaattgtttcaggtaaagttattcgtcgaagtattacaagatctcattatgcaggtgatttcttaggtgcatgtgcttcaaaacttttaaatttagataatgatgaaaatgtaaattactcaactgcatattcaaaatcacaggaaatgtcagatattattcatgcagctttagatacttctgataatgattatgttactttaaagggtaaaaatttttcacattcatttacaagagatgttattaataaatcattattagaaccattatttagacctcattcatcttcattaggcgttccacaggatgctttaggtttaggtcaattagtacttaaatcattacaaaatacaaatactgcacctgctgcattattatcatcacttgtggttcaaggtccatatgcatcagcaccttcattagaggatgcattattatcagatattagattatatgttaaagatcatcaattagcagcttatagatcaactgatgcagttgaaagaataactactccttggatgggtgcaaatattttatcacaatttaaagatcttaatgttactaaacaaatgtatagtgaagatccagaaatctttgcacgtagaatatttggatgatgtatcagtattcttatgacatgtttactattatgtgtattttgtgtattagagcttaaagattgggtagctagctgtctgtatcattgtactctcagacacgaagtcgcgtctaaactaatattgaattgcaattataaattccggatgtacagatacgcaaatttataagggaaaatattaagggtaataagttgtgtactatagttaagttagttataaagagtgagtataaatagaaataaagaaagtattagaataagtataaaaacatgtgatatgttcattattgaaatgaggggaattcctcataagtcgataggaccgtgaatcgtatatttcacgatctcacacaattttgatatcacatcgcccatcattaacatgacacacaggttattacttctgcttttttacttcctcatttatttatacgtattaaatacaattggtcctaaattaactaaaagttacaaaagtatcacttataattagataagactatcagagacaactgcacacgtcaaagattaaagagatcagagatatggagaggaagaaaagtttcgattttgcaaaatatttcaatctcagatattaaagaattaaagaattttagaccagtttccaaacttgcaagaagttttcataaagattggattgatgaagttagatcttacgccattgagaaatcatcaatcgctttcattaaggaacatttcttagcaactagcaaacaaatctctatgtgtgctcatttacttcattctacttaagttttgttaattgattctttcaacaaattttattcatttttagacactattccaaatgttgttatacctgaaaggactgaagtcaattctttgcaaactgatgtttgacgttattataacctaaagaaaggtaaaaaatcattttcaaagaatgaaaaattcgacgctattaatgttgattttgatggtgatgaattagttttcttagattgttgtccatatctttctcgagcaatactttctctctaacaaactcttatcttttaatcttcaacttgagcagttatcttttaatagcaacagttcaaataagaaaaagttttctctgtattatcattttccgcttgtttaacgtgatccctttatttttgtcagaactaatgtttactctttaaagttattacttttgtaactttcaatttgagattagtttagaattgattgtatctttataataaaacttgtctttaatgttggtaacacacgacaaatccactgacacaaagtcgcgactaattccttatataagttgcttagccgccaaaatctcactgagtcaaaaaaaattgaaattttgaaattttgaaagatcttcaatttttaacatggaaacttctcttatagatttctctaatgttcaacaagaccagaataatggcagaatctattaaaactaccaagaaggccttatctacagctacctcaaatgcacctgcttttactcttaaaaccccaaagggtaccaaagattgggcagataaagatatgactgttcgttcagcaattttcgatcatttaacttcattatttaaatctcatggtggtgttacaattgatacaccagttttcgaattaagagaaattttatctggtaaatatggtgaagattctaaattaatttataatttagaagatcaaggtggtgaattaacttcattacgttatgatttaacagttccatttgcaagatttgttgcaatgaatggtatttcaaatattaaacgttatcatattgctaaagtttatagaagagatcaacctgctatgactaagggtagaatgagagaattttatcaatgtgattttgatattgcaggtgtttatgattcaatggtacctgatgcagaaattttgaaaattttaacttcaggtttattaggtttaggtattgataactttaaaattaaattaaatcatagaaaaattctagatggtattttccaagtttgtggtgttactgacgatgatgtgcgtaaagtttcatcagctgttgataaattagataaattaccttgggatgatgttaaaaaggaaatggttgttgaaaaaaatcaacctgaagaagttgctgataaaattggtacttttgttaaaattaatggtacagttcaagatgttttatcaaaattaaaatcttttgatgaattaatgaataatgaatctgctaaaactggtattgaagaaattgaaacaatgacagaatatcttgaagcttttaaaattgatcaatttatttcatttgatatgtcattagctcgtggtttagattattatactggtgttatctacgaagctgttactgaacaatcagctccaccaactgatgcagcagagaaaaaattaaaatcaaagaagaaaaataataatgatgatgcatctgaatatgttggtgttggttcaattgctgctggtggtcgttatgataatttagttggtatgttccttggtacaaactcaaagggtaaaaaggcaccttcaattccttgtgttggtgtatcatttggtattgaaagattattttcacttattaaacaacgtcatactcatttagataaaattagaccaacttcaactcaagtttatataatggctttcggtggtggtgatggttggaccggtttcttacctgagcgtatgcaagttgcaggtatgttatgggatgcaggtattgaatctgaatatttatataaaaagaaggctaacccacgtaaacaattcgatgcagctgaaaaatcaggttgtccaattgcagttattttaggtaaagaagaattccctaatggtgatgttagagttaaagtgttaggtcaaggtgatgataatgaaggtgaattaataaaattagaaaatatggttgaatatgtttctaaaaaattacaagaagtcaaagttgatggattgtcagatgttgaaagattacttcaagctaaataattgtaaatataataatgatgtataaagtagaaactttaatgcaatataataataataataataatataatataagttttaatataaactaatacagaacgttttataaatcacctgcaatatcaacttcaaaaccaaatttaccaggtttatcagaatctaatgattgtttccatgataatcttgcagaattttcacccttattgtaaactaaaccaacatctaatccatgtttccaatcatttaaatttttcaattcaccaattttactaatttcattacttgttgtacatccattaatactataataaagtcttattggattattaatatcgattaaacccgcctttgtataaactccaaaattataacttaaaaatgatcctgcaccaacagattttaatggcataattggagtttcattacctgaaacaattgggtaaaatttatcttgaaaatgaattgtaccaccatttaatgcattaaaattaagaatacttccaaatttaaaattacttgaaaatgttaaaccattaccaaggaatgatttaacataatccaaattaacattcaatttatagaattgatcttcagaatgtgatgatgcatcaattaatgatgcaatacctgatacttcattattaacaccaactgagaaaccattcattggtaatttgaaacctgaacttgttaaaaatttcatattagttgataagatatttaagaaaattgaatttttcaaactttcacctgcatatattttaacttcatcatttgcactatcgtcaacatcgtgtatatttctgttaactatattaaaaccacctgttaaagttgctaatgcacctgaatgcttacaatatttttgtttaattaaaccaaattgtaaacttgaagaattttgatttgcagattgataaattgtatcatttgttttaatactattaaaatcaccaaataatcttaatgatgtattgattgttggttttgaaaaataaatatttaaattttgtgataatgttcggaaattatacattgaattaattgtaagattttcaccactaccaaatacattattatttgaatatgatgcattaatatagttatatgcatcattgtgaacatttttaattcttatattagattttggtaatggatgtaaatgaattgtaccagttatattagttaacgcattattaaattcatcaaattttggttttgattcagtatctaaatcaaatagtaatttaacatctctaaaattacctaaaaatcttaattgttgcattactttattaccgtccttaactaaatcaccaattgattgtgttgatgattgtaataatggtgaaatgacattttcaataaattttggattgaatccatctgcaccttcaacggttaatttttctaatgatattggagtagtatcaatatcaatggagttcatcttacctatagtatagtctactttaaaagtatatggcacagttaatagattaccaaaatgagccattatgcaagcattgaaatagttgattttttttcatggtagtgcgaacagccaatgaaagtggcagatgggttggatcattctacaacttttcacttagagtgtctctttctataaaggatataaaaatgtaattatactaaataatttagatatagtatttgtattgtgaatttttttgaacagatttaagtactttagaattgtaaattggttcgaaaacttgtttattgtgatgaacgtgatgtgggaagtacccaacttcaacaggtttttgataataactatgaccaacagggaagtattgatagcttgaaccactatcttgtacctgtactcgatcttttgatattgttaaattagttatactatcatttgttgaatctttattatcttcaatatccacagatacttcttcaatttgtgtaatcattggtgcatcatctactgtttctgatttatttctctttctattgttcattttcttttcatttatgaacattttacttattaaaacatctcccttattcgcataaaaacttggatttctaccacgtacaataacaggatgggattcaagtaataaattgatgttctctgtatttgaaaaatttgttaattctacctcaactataactgtataaaatttagatattgcatcatatctattattagcagttgctgatttaaacttgagttgatcccaagtaaatgataagatattagaatttcgagatttagtttgcgattcctttaattcatcaaatgtaaacgatgattcagttttattcaaaacagtacgtctcttatttgatgatacagtttctgcaaacatgaattcctctctttttgttaatgttataaattgacaattttcatcattaattttatgtttccttagactgttggaaagtttcaatcttagtatggaatctgatgttaattgtgttttacttatatcaatatcaatatgaacagatataccatttcttctataacaagcgagttgtttaagattggattcatcctttaataattcaggatttgtatataatcttccactaagatttgcagaaatattgatatctagattatctaattgtgcttttgcaacaggttcaagtttcaagagatctaaaacctttgatgtaaattcagggtttattccattatcgggtggagtatcttctttacttttagattccccataattattagtttcctctgtatttttattacaattattattacttttctctggactcatagatgaaaagttaacttgtggtctgtttgaaccagttcgaaaagatagtatatcgtttgaatcaacatttgaatcaacatttgaatcaaacaattcaatattattaggatcttcaaaatagttaaaatctaatagattagatgatgaaaaagttgtttctaatggcaaatatctagcatagcttgcagcacctattattgatattgattgatcttcaaaactacattgactcattatatctatatctgtcgttgatggtatacttctgagatttttagggtcattattagtatcagtatttgtggtagtatgattattaccttcgttatttgtgttatgaagttcttgcagaaacaaggaagcaaactcgtcgtctatgttatttctatatttcatggtaagcttatcgatcttggttagtaaagattaggagaaaagataaaagaatggttgaaaaatgtggagaaaaaaaaattcggaacttcctctctttttatacattttttttataaagttgaatattttttgggtttataattgattaattagtttacaatgtgttgatcttatagtaatagtttacaaagaataattatatattatataaggttccttttctcattaattaaagctgaaattgctgctccataaatactgctatcttctataaaatccaatgaaatattcggagtttcctctaataaagatttttcaattagtacttcagttacagcttttttataacctggaaaatgatttaacatggaaccaacaacggaaatatctaattcatttaaggaattaaactttccgatattgactaatgaaataatatatgaaactaaaataattgaagcacgataaataacaaactccgttatttttttcaaaattattaattcttcttcaattaaatcgaatccagcatttttaccttgatttaagagtgacagttgatgggcagttaatgaatattcagtatttgggaaatttctttcgaataatgattttttgttgtcattaaaatttataaatattcgacgaataatttcgggtatatatcttcctgatgttagcaactctaatggttgaaaaacaccataatgggaggttgttaaatgaggtggtaaaattgaattatcattgtcaataattgaccatatacctgaaatttcatgatcacttgcagacaaataatctttcaaatgcattccaagaaatgatgcttcagtattgacaagtaatttatcatttaaagcatatgatttgggtaattttgattttttctcatttgaaaataatttagaatctataagcatacaagaatttacaccagtaccttgaactaaacctaatttagaacttttaaaataagcacctgaaataaaaactgatattgaatcattaacaattgtataaatttttattggtatgttattggaagcaaagcaattttcaaaaatatcctttagatcaccagatttaaattcatcacaaactgaaaaacctttacctaaatccgatactatacctctattgggagcaatattttgaattattgggaaactccaagttagaccaatttttattttattatcattatctgataacttttcaatcaattgattatcaataacagatttaaaattagttgcaatccagttgaaaaaatgtatattaaatactttattatcattgttaatattccaagatttatttataatacattgagcctttttattaggtaaaaactcaacaacactaattcttagagttgaaccaccaatatcaataactgttacaaaacctaataattgttcattttcatttggtgggatacttaaacacggtagcatacaattgtttgatttatatattgagtcaaatatttgactttcaaaaatttcagttatcttttcaaaattatcattgatttgattgattttaagataattaagtaatttttgttcaataacattatgggtatcaaaatttaaagttgaatctgatgaactatctgtatcagttgttaaactttcagttgaatctgatgaactatctgtatcagttgttaaactttcagttgaaatggcaacagaatctgatttatcagttgtataagtattttctaatgataattctggggtacctatattcatttataatattgatagtttgttaaatgtgaaaaacagaaaaaaggaagatacaataaagattgaataaagtatattaatgaatttaatatcacctgctatatttgtttggataagcgggagtatttgtttggttaatggattaatagattaagagattaatagatgaaagaatgaaaggatgaaaacaatacgaatatggagattattgatctgtttaagaatctagaaaatgatcaagtgtttagagttccaatatgtgaaataaaacatcacattaactttcacttccaatactgtgatataaagaagttaattaaatgataataaatttgcaacagttcaattatgtgttacaaattaataaagatggattaaatttcaaattcagtaaatgttgcaatcaagttgaaacatctccacaaaaataaatcaaaattgtaacacaagatgaattcataaatattttggagaaaaacaaaaaatccgcgaagtccgcgaatttataattcttttttcttttgtttttgtttttggttttcgtgttacttaattaagtctctctcttatcattcaaattgtacttgccgtgtgtgtggtgagatttttttagtattgtgtaaagagtgggaaatacgacagttttaccatgtgtttttttttttgaaatcatcctaagtagtgaattaataattgtattgtaatcattgtagagacaattagagataacttcacattcaaaatgaaaagatcacccactatggatatgtttcgaggctttaatattattcaaatggaaattgctgaaacatttgatgatttagatcatgcaaaatataatgaaatgaaattaaattgggcagatacaattttcccctgtttctcatttataagtggtatgttattaaagcaagataaaataataccattaaataaaaatattcaattaattggtcttggtatgacatttaatttaattccaacaattttagaaaataaaaaatttagacctttaggtgtattacagagacatggtttgagttcaattttattaaataatttaataccaccaaattatcgaaataaaataattttcccaattgcattaacaacaatttggtcattaatttcaaaatatttagcaaataataccgataaaccttttgaaaatgaaatttatactgcacaacaaaaaattgattcaattttctttaaaggactgtcaatatcatgataattttgatcctgaaggtttattaggtgcattaatgacaactgttacaatttggttaggttcatggtttatatcacaaaattttaattataaaataattccatttataggtttttcattcattctatctggtagattattgtccaatgcatttcctaatatgtatccagtttcaaaaccactatggacaccatcatttacattacaaactacaggttatagtatattgaattattgtatatcgaattggttatgtttaatattaccaacttcaatatcaaattcaattcaattaatgggacaatattccttagaaaattatttctttggagaattattattagttggactaaaggaatcttatgttagatcatctggagtgacattatgggataaaattaaatcattttttaaatttaagttcccattcacaaatattgatatgagtccatatattatgacaagtattttcaatgttgtattattaggttttacacatttatgtcattggagtcatttcaagataagacttttctaatctaatttagtatatacccgtttcctttaattatagcttaataacttataacttaatatcttccgggataaaatcaacccatattatataacttccgtcggtatgcgtgtgggggaaataaaaccgttggcattagattaaaattgctacacaagaattactcggagatttgttatgttacaatttctccttccgcactcctcgtaagatccttatcgctaatcttttcccgctctatgggctttattatatagtgaaaatatttttcagtaaggtgtttgattcaagcagtttttttgagtttcatttcacaaagttcattcaaaatctggggattcttatcgcagattgtagcataggatagtgtgttacaatatactattatcgttttgcttcttgttcaaacatatatttccattataaaagaacacttacttcatcttactgtgacttgactttaaacattcactcaatagagtcatatacttattattaatctatttttattttatatattattgaaaaatatctaatttaaacataaatatattgaagataaaccaaactaaactataaacactctctaaaatatgtcagatagtagtttagcaaaagataaatctcaaattgatgaatttgaacttgaggttgcaaatcatgatttacaaaatttattaaccgttgaaaaggaaattggtgtccttgaagcaataaaattatatcctaaggaagtcttttggtgtggtgtcttttgtttaggtgttgtcatggcaggttatgatggtcaaattatttcagctttctatggtttaccagctttccaaaaaagatttggtgttcaattagatgatggtacttatcaaattactgcaccttggcaaactgctttaggtatgggttctccaatcggtcaaattattggtactttatgtgttgcttggccacttgaatggtatggtagaaaaattacttatgcttttgttaatgttggttgtattggtttaatctttatgcaattttttgctccttcattaggtgttttaactgctggtgaaatcttagctggtatcttatggggttgtttagtcctaattggtcctttatatgcttctgaagttgctcaaattaaattaagaggtattttaactgcaatgactaatttaagttttgttatcggtcaatttgttgctaatggtgtctctgatggattttcaactaatgcaactgaatgggcttataaagttccttttgcaattcaatgggcttggcctttaattattcttgcaatgttaccttttgctccagaatccccttattggttagttcgtcatcaaaaaattgatgaagctagaaaggcaattagacaaattgcttcaaaatcagtctctgatgaaattattgaaaaaagattacaaattgttattgacacagatagattagaacaagaaatggaacaaaccacatcatataaagatatctttaaaggttccaatttaagaagaactgaaatttgtacagtcgtttatgtcgttcaagttatgtgtggtgtcccatttgcaatgaattattcaacttatttctttgagttagctggtttcaacccaagtagggcgtttgatttatctcttggttcaactgctattggcttttctgcaacttgtttcacaggtctctctcttacatacatcggtagacgtccattatatctttggggtttaggttttacaactactttattatggattattggtttcttagatattcccaaaaactacttatctagacctgctctatcaaatacccaagctgcgttgatgttgatctggtcatttggttatcaattaacggctggtcctttgtgttttgttttaaatggtgaaattccttcaactaaattaagatctaaaactattgcttttgccacagctgttcaagcaatgttttttattgctgcaactgttgctttaccatatatgcttaatccagaaaatggtaatttacgtggtaaaacaggttttgtttttggtgcattctcattattatgtttcatttggagtttctttagattaccagaaactaaaaatagaagttttgaagaattggatattttattccataaaagagtcccaactaggcaatttgctacttatgatgttacctcagatttacaaattactggtttaccagatgaagaaaaatccaatgttgttgaggaaaacccttccctataattctttttctaaaatacagtgtttttatgataatttactgtcttttcaatttttccctatatattactactttctacagtacttgtataacgttttacaattatcgaataatttctaaccaataaaaccccgttcaaaaaaaataataaacaaaaccctaagtttaatgcttcccaagaattccttccccacaaaaatgtaacttttccttatgaaatttctcgtttgatcttatcggacttttatgtaacaatttcaacttgaagcaaaataatattgtaacacaaaacaataattaacttttaccctttaaatattaactatatggccagttatatcatataatcaacaatactgcaattatgttgaaaatactactttttgaaaatttagttttatttcaataaagcataaataatataatggttgagccagtcaaattcgaaactaaaaacgaagctgctaaatacgttgctttatacattgcaaattctataaatctctttcaaccaactgaaaaaaaaccatatgttttgggtttaccaacaggatcatcccctgaaccagtttatgcagaattaatcaatttatataagaaaagattagtgtcgtttaaaaatgttgttaccttcaatatggatgaatattgtgaaattgaaccaacaaatgatcaatcatacgattatttcatgcataaaaacttttttgaccatgttgatttacaacctcaaaatattaatattttaaatagtttggctgaagattatgaaaaagaatgtgcagattatgaagcaaaaattgataaatatggtaaatttaaccttttcatgggtggtttaggtccaaagggtcatattgcattcaatgaatcaggatctccaagagattcaaaaactcgtgtagttaatttagatgaatcaactattattgctaattctagattttttggtaatgatacttctaaagttccaacaaaagctttgagtgttggtatttcaacaattattgataattcaaatgaactcctctttttagttttcggtgaaacaaaaagagaaattttacataaaactcttacttctgaaatttgttccggtattccaagtacttatttaagagaacataaaaattgtatggttgtatttgatagtgaagctgctggaaattaaattgtaatttttaattaaatctagagacatttatataaataaaaaacatttaatcaactgtaattactgaataataattataatattggttaacaacttcaaatccattatcttggagactttttatttgtttatcctctatatcggttaggaagcattgagaacaattattatattgacctttaacatacattaatgcagtacatattaaacctaatttgaaaacttctgataatgtattatataatggatcaatgaaagtacccgtaatacatgcataatctttactgttaacatcatcatttgaacctttcatttgatctaagaatgggtagaatttagaaaatttggatttattattgaaaacaacaacacttccaacgattgatttctttgtaggttctaaagcaacaattatatctagattcccagattgatccaaatattgattttcgcagtctgtaagtaaatcattgcataattcagcataaatacaaccactattattattcttcatatcttcaaaattcttatttaattgaattgtcagtatttcaataggatttttgcaaatgtcaaacattattccaacaacttgtagttgtctaactaaattctctgcaactttccagttcgatatatcatctaatctcatcaagttacataatttttttttcgatgtcatattcaacatattgttaatatcaacttcatcccaagatgactttgttttatcacttacatttgttatatgttgtttatcaactgttgatattaatttatttatgcttattctatccatgctcgaattcattatattaccaaatgaacgttttcttctgttcgaggataatacattgagtttgtgttgataagaatccaaactaaaatcccatccaaatgatttaaaaaaattcaaaacttgttgattgctgtttgtgttattgaaaactaaatcattctttattgataacttaggaaaattatttcctaaatatattttagagcatttacaatcattgaataaatatttcatagttttggaatataaatatgttccaattgcaatatttctcttgtttttatcaactaataatagcacaatattcccaatattattcttctgacttttggggctataaacccacacagttgaaatacccaaaatgattttcgaacttgtattccttataacaaaactatgatgattattaccatcagaataaagtcttttcagactatttaatgaataattttgtaaattttgatctaaatatccattatttttcaaaagttgaatcatattctcaaaatcacgattaaagttaaatgattccacaagccaacttgtcgatattgatttatttcgatcattggatttattttcaactttattatcaacattatttagccctggtattctaccaaccgccttaaaatcaccaaataggatctttggtaagttacagagggcattaattgtatagtcataagtacaaatataaccagttggtgaaccacctatattaatgtcatacagaaaatccgtgggtgatgaaacacttataataatcatttgtctgttagttattccattctttttagattttaatgaatttgagttacataacattgaaacatgtttagaaactccaacttggtataaattattagttgtttctgcagtgaaaaacaacaaaactttagatttgagaattaattcttcatgaaatgatgttaaaccattagagttataacttgtatgataaaaattataaccaggtttatactctgctagcatcttacctaattccataaaaacatcctctccataatttagtttaccttttagtttagattctgaatttaaattattaatatgtgatttattaccttgtacatcaacagtttcatataatggagcaattagaggagttaacaaaagtactgtattatcattttccacaaatggtgttaaattattcgttattggtaagcctgagtctcttataacagttattgatttttcatatgctctatttgatagtaatctatgttgaaataatacatcatttgaaagaaaattagtttcattcaatacttcattccataaaggtaatttattctgtaacttttttattctttcaagacttttgataattttattttgatcaattaattgatccttaatgactgattttaaagcatttattgcttgttgttgaatttcaaaattactacataacataattaaatcacagccaacagaaaatgccgatatacatccttgaacaacaccaaaatttttatccaatgcttccagtaataaacactcacttattacaacaccatcaaatgcaacttttccacgtaaaaggtcagtaacaattgttggacttaaacatgcatgtaaatcatttggattaaccgtcggcactgcacaaccacctacaagtacactatcaagtaaattatctttagttaattcaatatacggtaccatgttaaatttaattaattgatccgttgattcagatatcattggtaattcaaaattagaatttatagtagcagatccgtaacctgggaagtgtttaccacaattaatcatattctcatctttgaaagctctagctgcagctcgagaaaattttaatacagtttctaaattatatccataagatctaacaccaatcatttgatgtataaaagaatttgcagtatttttcaaaatatctaaaactggacctaaatacattgaaaatccaatagcttttaattctttagctatagcacgataaacttgataaactatctcttctgaattagttgcacttaaagtcattgcaccgggaaattgtgttatatgttccttatcaaataatgaatttaacattccaccttcttcatcaataacaaatattattggatgttcataatttgattccattgctattgtttgtaaatcttgtataagtttctttgcctgtgatgcattagtaaaatttttgccacttaatattatgaatcctatattatattttgttatcagtaatgtaatttcttccgttacatcgataccatcaaatcctacaaggaaaaacttcccaacttgattcattagataagatgaattcaaattatcagtcattctaatgattcaaaacttagatatcagatcctattactaaaaaactatttattttatgtctagaaaaggaaattaaacctcctccaaactaaccccaaattcatgtcactcatagaaattccccagaaaagaagtgtaaaatggaaaaactagaaatattattttccaattgaaaaatgcaacacaagataaacgttaatcaagcggagaaattccccggggtgcgattgcaacattacgaaaaggccgattatcgacactcgggtgtacttttcagtttggtattcatataatgagtgtggcattattgcaacattataaatgaagactgtaacagccaggaatatgatgaatatgttgagcaggtgatacatttttaaaatagttttgagatgaaataaccactatcaacaatcaaatttttaataaaaaaatcatttatcttaactaaaagaagcaaaaaagctaggtatactcaaataattaatgataggtataatacattttaccaactgctatttagcagataactctcagcttgtgaaaaaagatttgtacatagatacaaaacaaggtataatcatagatggaagtagtatagagaaagaaaataatgaatgtaaagaaggaaaccaaagtgaagctaaagtagaagttattgatttagacggtaatttaatatcaccagggttcattgatattcaaataaatggatgttttgggcttgactattcaacaacttttgaagattctcaaagtaaggctaattttgtattccattatactgaaagcatggaaaaattattaaatcatggagttacaagtgtttgtccaactgttacatcaagtttttcaaatgtttataatgatgtaatgatgataattggtttgaaaactagatcatcaactaaaactgattcacttggtgttcaccttgaaggacctttcatttcaccactcaagaaaggatgtcatccacctgaaactttaacgactatggaaaatggttatcaatcattaatagatatttatggtgaagaatttgaaaaatatactgcaattcttacagctgcacccgaagtcgacaactgcttagaagtgataccggaaataactaaagataataaaattgctttctcaattggacatacaatgtcagattttgaaactggtttacaatcaataaaaaatggtgcaagtatgattacacatttatataatgcaatgccaagtttaaatgctagaaatcctggtgttattggattaactaatacaacacaagatattttaccttctgaaaaaataccatattatggactagttagtgatggaattcatgttcatccaacaaatattaaatcatcatattttgcaaatcctggtaaaactatattagtcactgatgcaatgtatttaattggattagaagatggtatttataaacgtggtaatcaagaaattgagaaaaatggcaatttattacatttaaaagataccaaaacaattgcaggttctgcaactcatttaattgactgtgttaataatttaattaaatggaccggtatatcaattgaaaaagcattagctactgttactaataatcctgctatgtcattgaatatttctaaaaggaaagggtttttaaaaactggttgtgatgcagatttagtcattttaacaccacaaggtgaaattaaacgagtgtataaacttggtaatagaattgtatagaattatttaaaaagttattttatctaaattagtgttaactactgtttattttgctgttttattgattttttactttttttaacatttcattccataatataatttttttggtatcaaacttttttgcattttttcatatttttcaagaaaaaagtttcaaattttaaagattttaccgttttctttgttgcacatatattactgatgttataatactccataactagcataaaaaaggtaaaaacctttacattccttgtttaaagttaattcaacaaaactacccaaaatatcacgtgaccttattttaaaaactcaaatatttaaaaaatttgaaaacggtgtcccttcggggacatatggtcaaacgaaaaaatacagagaagattagcatggcccctgcataaggatgacacgctttacaaagagatcttactcaacttttttttttcaatcaattacattctatgtaaagattgtttgggactgtctaatatgtacaatcaagtgtttttggtgaaaaagggggttaaaacatgaatgaattttaaaaatgggaaactttccaatcatgttttcgaattttgaattctaagaaattggaactttttttcattatactctaattagttgaactataagttattttaattatatcaatataaacaggggaaattacacaaattaatattaaacaaatttaatcagtttcttgaactgaagcagttgattcatttaagagtgaagtaatatttgcaggtggataaattgcagttaataacataattaattcataaatttcagctgggacagatttttgataaatatctaaaattgcagttggatcaggataaactgataaagctctataaaaacgaattgctgcatcaatttctttaccaacaattgcacttaatttttcagctaaagtaacttcttctatgaaagtttgttccttatttgatgtagataaaggttcagataataaagattcaactaatttcttctttaaaacttcagttttttccttctttgaaatttcattctttaatttttcttccttttcagcttgtcttttctttaagtaaattgattttctaaattcagcattatttcttctttgataatcaaagtaaagacaataaccgactgcacctgcagctaatgaaaggaaagtaacggtagctggatttgccatttttatatgtttctaaatatgctactctagtgtaggaaagaacttcaagaaaaaggaatagagaatcaggactacttcaaaggcacaaataatgttgaacaaattagtaggtgaagaaaaaatgccgaaatttgtgaaaaggggagagtgagtgataatttattatataggatggtgtacagatgaaagtggggtttatgttgattatggaggtatttacatggttataaggggatatacaggtatactagtagtataaatatatgattagggaatttcatatgagtttgactgatatggagtagtcttgtgttgattgaaagaaagaaattaatgtgaaaagatgtaatatgcatgaatttcataaattttttttgatctgaaatagatcttcaaaatattttttttatcttgaactggttctgaaacttttgatttaacagggaaattttgatatatttagggtatatatacacttacaaaatggcagttaagaaaagatcaacattaagaaataaaagtagtaaaaaaattgggaatattacaaagaaaagtgttgaagaaatcaccaagaatgataaaataattgataaaattgcagaaaaagttgagaaaagtattgaagataataaaactacaaaatttaagattaaaagtaatagtataataagtagtacgataagtactgatcctaatcaagttggtataagtaaaagtgcaattagaagaaggaaaagaaaattacgtgatcaattaagacctaaattaacagaagatttattagatgcattaactgagagtacgaatacagttattaataagggagaagatggtaaggaagaaattataattgaagaaaaggttaaattaaatcatttaccaaatccattaaataaaagaggagaaatggcattattcaagattgagaatgaacaatttaaacaagttttgaaaaataaagatttaagaactggtggattaagtgcattaaggaactcaattttaagtaatttaaatacagaatgaatgaatattttaaatttagaattttttttgtaacattatttatttatttataaaagtaataaataaaaagggaagatttatgaataaagtaaaaaaaaatgaaataaatataaaagtaatagttttaactaagtaaaatagaataataatgatgttaataaataataaacaaatataattgaattaattgaattaataaattaataagatctataccacattctaccagttgtatcactcatcattttcttttgtaattggaagataccatataataaagcttcacaagaaggaggacaacctgggacataaatatcaacaggaataactctatcaacacctctaacaacagcataagaataatgataataaccaccaccatttgcacatgaacccatagagataacccatcttggataagccatttgatcataaaccattcttaaagcaggagccattttatttgtaacagtaccagcaactataataatatctgattgtcttggtgaagctctgaaaataatacctaatctatcttgatcatatcttggagctgaagcgtgcatcatttcaacggcacaacaagctaaaccgaaagttgcaggccaaaatgatgattttctagcccaatcttttgctttatctaatgaagtaattgcataatccataacatttgataaaggtctttcacttaaaactggagtatcagttggtaaagtatttggtgtaagacttccagagcgtatatttgatatagagaatgatctaattgaattctttaaaattgaatttgaaattgaaactgtatttgatttaaatactaaagattttgatatttgatttaacattttatgaattttatatgtatgtatagatgtttttatgtatgattgttaatatgttattaataaatatagtaataatggaatgtgtgtataatatgatattatttatgattgtatttcttaatgaatatattaaagtttataattataataaatgaattacagacagattgatgaacaatagtaaataatataattgaaataggatataagtaagatctttactagtaacagttaacgatatctgtaagggaaaacttaaatgaaagtatcaaagatgaattgagagacgtttgaattcaaatttaataataattgtgtaattggagcgattctgttggttggaaaagtttttgtatttttcatagtagtaattgagtaattgaggggaattgggaattaaaataggagaaattataaaattacgtaataccaaagacgcgtctattattaaattaaattaatgtcacgtgacacagacgcgactattaagaaggctcatttttattctttaattaattaattcaattagggctcagttgatctgaattattattaatagcaactttactcctttggcgtttgctcatctttgtcttcttcctattgtctacattcttcttcataaaccggacatcaccttattcgagagaatggaattacaggtagtaattagttgttgtagtaagtatatttgaaatttagaaataggtctagtctatcgatgaaaaatttatagtactaacgaattaatatataaggcagttacttgataagttaaaacctacaagaaaagataaaatttattacgaatatttcaagatactctataacagatcttatcatatagtgcccaatcatgaatcaatagaggttcaaaggttccttaaagtaaataaataaatcaaactgacaccaaaacaaaaccagccatcgggtaatcctcaaaactgccaaaaaagaaacgaaaaattactaggggaaattttctatttttgctatcaaaagaaaaaatattctattgtttgtttacaatttgattttactttttttccttttaccacagccacttttcaaaggagagataattatttatcgtatattgtgtgcatgtgtttcacccctgagtcaaatttctattttcatttaaatactcttgaatttctgccttgatctgctattcttccaaaatgctattttcactcttatttttactactttcttaaaagtttcattctttaccctttattccttcacttttttttatcaaaagataataatgaacttatcattaatatacttattttctcttatcacattcactttatcttctccaataaaacttcaaaaaagaaactctcgttgggattatagttcagatgatatttacggtgttaatattggtggttggttagtccttgaaccttatattactccttcattatttgatgcttttggtggtgaagattcaacaaaacctgtagatgaatatcattttactcaatattatggtaaagataatgctgaaaaagttttacaaaatcactggtcaacttttatgactgaagatgatttcgaattaatgtctcaatatggtttaaattttgttagaattccaataggttattgggcttttgaattattagataatgatccttatgttcaaggtcaagttgagtatttaaataaagctcttaactggtgtgcaaagtataatttaaaagcttggattgatttacatggtgttccaggttctcaaaatggtttcgataattcaggtttaagagatactttaacttggcaaaatgatcaaaaaaatattgatgtaactgtatccgttttgaaaacaatcgctgaaaattattccactgacgaatacaaagatgttgttatcggtattgaattagttaatgaaccaattggccatgatcttgatgaaaccaaattagaagattattataatcaaggttatgatattattagagaaaatggtgatgttcctgttattattcatgatgctttctaccaattagatcatcactgggacaatatacttaatactcaaattgacccaaacatttgggatgttattgttgatcatcatcattatcaaattttctcagttgatgaattaaagagagatattgatgatcatgttaaagttgcttgtaatttaggttggcaagaagcaaatgaataccactataacgttgtcggtgaatggactgctgctttaactgattgtgcaaaatggttaaacggtgttaatagaggggcaagatgggatgcaacttttcagaatgattatgcaattggtacctgtgatcatttatttactgcagattattcatatttccaagatgaaagtgtcagatcaatgtatagaaaatatgttgaagctcaaatggatgcttacactcattcaaaagtcatgggttggatattctggtgttggaaaactgaaaatttaattgaatgggatttcaaacaattagtttcacttaatattatacctcaaccattaacttcaagagaatattataatcaatgtggttatgttacttattgatttagtatttttccattaacaagttttcatttcattttcattttcattttcattttcattttcattggctggttttctttggttttttcatttattttactaacattacttttctctatcttttgctctctctcgttatatattagactaatttgcattacattcattctttgtatatcctaacacgtgtatcattcatttataaaacaaacaaacaaaaaacatttgtacagtataaaatgaaagtttcatggcaaaaaagttgatttcacactatcaacataaaatttctgatttttgaatttttttattgttacatgtcaaaattgatcttacaatgctaactttttattactaaaattctacaaatcatatacagtttttttttcttgatcatactaaatacacaataaataatggaatgtccaatctgtttagaaaatataaatgaaagtgactcaaatttcacaataactaatccgtgtaatcatttttatcattttgattgtattgattcatggacaaaattatcatcatcaacatgcccaaaatgtcgaattgaattaacttcaattattaataaatcaaataaaattgaaattaattataaacaacaagataaattagttaacatgattaataatgaatcaacttcaattgagaatcatttaaatactgaaagagataatcaaattgatagtcatttacataatcaaaaatgttgtatctgtgataactttgttttgattaatcaaattataatttgtccccaatgttcatcattatatcatcgatcatgttctgatggtttaaattgtccattatgtgaagaatggattgataatgttacttctcctcatttaactaaacgtaggagaaataatcatttaaatattgataatgataatgaatactatactaagattgttgatgaactaaataatagaacaaataatgtacagaaagaaacgtccaatgatacagaggaacaagcttggaatgtgttgaatttaatacagaatgaaaaaactacttgggcacagcctcctatatcatcttcaataccagcaactacaactgcagtttcatcatcatcatcgtcaaatattactactacctctacgattgaacggaaattgaaaaggccaaatagtcaaaaacatgaactgaaattaactcataatgcattagctaaacttgattcaaaatttaatagttcaaatagtaggaaaaatcctaaaaatatacgatcacaaataatcccaaatcaaagaagaatcatatgcaaacctgatgaactttcatttatacaaaaattaattattcaaaggcttttattgaagccaataatatcaagttctgaaatttctaataaattatcatttgatgattatacaaatttaaataaattattatcacataaattatacgatattataaagaaaaatgaaataagtatctcttatattaacggtataatagaattagctgaacgtgaaggatttcttccatttgagaatagaaaagatgttgataaatttaatgtttcattccatgataattcaatagttacaagatttgttaactgtagttggctaacgaataataatcatattaatacattaattaatgatgaaattacaaaatttatgcaagataaaagtaggtaaactgctcataacggttcattaaaaagagattttgttatatattaaatattaaatattataattgtttacagataagttgaataaatttcagttattccattaccgataatagtttgtccttcatcaacatatttattagtgtctttatctaataatttgatatcaggtgcaaataaaactaacttattatctttgaatataactggtgcgtttgtgaatgctatagtatgattcaatcgtctcctatatttgatgcatttgaatctttcattgttcttactattaccatttgcatttttatttccattttcattattttcattattttcatcatcatcgtcgttatatttatcattgctaccaccacttgatttatttaacctttgacttcttgatgggacatcagtataaactcctccactcagaatatattctagattatcattttgactccaaggaccaaaaaattcaacattataaataattgaaacatttattattttccagtcccttctttttaaatctaatgcaaaagttgcataaaatttagatcgcttctgtgaatcatagaataaattctgtttctgactaagtactaaatttcctgtatcatcatgttctttataataaaatttttgacaacattttaaaccattttcccaattatcaattttcgatttaccatctttatcaaataaattttcattatcattattattattaacatgaaaaaactcaaaagttttcttatcatagtgaactttttgaatacctccaattatatttatataagaaccagaaataaatgcttgatgaccgcagatactcggtatttgttttatacgtgcaatatccgttaatctataccataattcagtttgaaaatcataaatccatgaatcatttaaaattgatttattataaagaatatcaaaattattttcattgacaacttttgtatacattattgatgatccacctaaaacaaataaaattttattctttaatgacgcaattgaacttgtatgtaaattattcatcgaaaatggtgaatgttgtgatgaacttgtattattatttgaagaatttgatgatatacttgtagttgctgatctagtcgattttgatttacttttatcaattaaaaatgtttgtggtgtaaatgctagattgatattatgttttttctttattggatttggtgaaaatattttgacttcatcaactttttcactatctttatcattatcatgtttcttttcatatgtaaaattaaggtcactattatctgatgaaatatcatcatctttccatttgaaaaagttactgaatacactactatcaatcagattcaatgagaagaaacctcttggagctggccaatttgtatcactatgattaaaaacacctgtaaaattggaattatttgaataattaggtaatttattcaaattattatcaataatataactaaaacattcatcaactaaactaaaattactgattggacttgcaactgcttgatctgatgtaccattactgtcaagaaaaaaatcacatttccataaatcattcattgcaataaatgtagtaccagaatcatgcaacttataacctcccatgacaaaaatggtagaaggttctttataacttgttgaataagtttgtttaatattattcatattgctgttattcacatttttttgatcatcaaaggtagatttattacccattgatttattttcttcaattgaaacagaaaccatcgaatgaccaaatcttggaatcgacgttgagaaaattgaactatatgatggatgaactgataatttaatttctctaaatttacaattaattatatcaaataaccaaaattgatcatttgggattaattttttctcaattgtacaatgtaattcatcagggtatgtaactgtagtttcaatatctaaaccaccataaaacataaaatatcgattacttaatttaactgcacttgaacaaatcagggatcttggggaagaatgtgaaataatagaactaacagttgcactatttgaattcagcataaatttattcaacacatcaatattcaataccttatcatcattattattatcattattattttcatcattatcattattgttatcattattattatcgttattgttatcattattattctcattattattgttatggtttccattactgcttttagtagtattactacttgatttacgatgatgactattaatattattattatcatcaagattacaaacccatctaaaagattttgattccggcagatattttctaacagaattaaaaggttttagagacattgattctattttatttttatccaagggtaatggtaaatcataatcacaaatcattttaaaattttctggaggtattttaaaatttttagttaatttttttaaagttttttcatattcatcagttaacattgcatttataccaccatataaatagacaccatcaggcatatcaacagcggtatgatatgaaacaccagctaatggttgatctgagaataaagttggtaaatttgcaaaactatcaaagttttgaaattgttcacttctattagttttttgaatattttcatcatttgaagtaattgctctataaacttcatgagatttataataatcaaatgattcatttggaaaaaaattggatttattagaatttgatgttaatgttgttttcaaatttgaaaaatattgatgatatttataatttgctttatcatatttattaggatcagataatgggacctttgaatacatcataatagttgatgcaggttgtaaatagacaggtagccctggtctccgtaggtattcctccattcttgtataataattgccaatacgatagacttgtgtaatggatcagaatgactttgtgaaggaagaattagcagctatgtacataattgtggatgtaccaaagactcggcgtaaaattagggttgcaacttgacacattttggtagcgataaggtttttcatcaacgacatatcccacattactaaggttttttcttgatatataaatcgaaccaccttactacggtcgttagttagatatatatatattagatattatatattatatagagaataattaattggtaataccgtaatagtgaaggtaagcagataaagttttagtaccttcaatataattcgcaacatcaactttttcattaattgaatgtgcaccatcatcacctttacccattggtaaaagaaggacatttgattttaattgttgttcaaaagtaagagtaattggaattgaaccaccttctctagttaaatctgggtcaataccccaaactttctttgttgctaatttagcagcagtaaattcattattaaaaggatcacttacccaataagcaccaccatgaattaattcagctttaaaagtatttggagattttaattctttgaatttttcattacaataatcgataactaatttatctaaagtatcagaatcgatatttggaacagttctaatagagaatttaccaataacttgtgaaggtataacagttttagcaccagaacctgagaatgcaccttcaataccatgtaatgataatgatggatatctccatctatgcattaaaatatttttcttatcttgataaattgcagtatctgaaccagaagctaaatttaattcattaacatcaaattcaatatcattatataaaccatcttccttttcagttacaggtgcaaccatttcctttataccaggtatattaatttcaccattaacatcaactaattgggacataactttaattaaatcagtcattggttcatgaataacaccaccgaaaatacctgaatgtaaatcagcacctggacctttaattataatttgataataattacaacctcttaaaccataagttaaaacaggttttttagtaccaagccaataattatctgatatacaaacagaggaaacatttttaaaatactcatttgcttctctttcaactaattcatctaaacctaaagaaccagattcttccataccttcaaaacagaaaacaatattaacaggtaattctaaacctaattctctatgagcttcaatagaatttaaccaacccataacaggacctttatcatcagttgaacctctaccaaataatttaccatctttttcaataagggtaaaaggatcagaatcccaaccatcttctaaaagagcaggttgaacatcataatgaccataaattaaaacagttttcttatttggatcattaccaaattttgataaaacaattggaggtaattgtaaattttcatcattaacaggtggaggttgaatacctaaatctttaattgtaatatcatcagcacctaaattttttaattcattctttaaaaattcagacatttcgaaaacttttggtcttaaagtttcatcaccagaaactgaagggattgaaacagcatttgataatctttgaataaattttggttttaattcatcaattttagcaaataaaggatttaaagtagaatcaatttcagacattttatttatattaattttacctaaacaataatctggaatgttagtatttgatagagatcttcttaaattattaaaattattaaaattattaaattttttagaataactaatgaattttaaagatttaagggaattagaaaaaataaacataccctgttgggagaaaaaagaaagatattaattaaaataaaataaaatggaataaaataaaataaaataaagtattcaacttacaataataatcataatctctaaggacccattaaaagagccacaagagtaatgggctacaaaaacaaaaaatcaatcaatcattacgtaatacaaaatacaaaatagacgggacgctgagccaccaacttttttaaaacgaggtcgatgggactatatttggaaatgaggggtataaacgtataaacgtataaacccgtttcaataaggggctctattagtattattatttataatggatctcttactatattactagtacaattgttagctctattttatcataacactagtgatgcttttgttccttatcttgtgcattagtttactattagtaatgtactagtatgtgttggtatgcattaatacatgtactaagtatagaagttcgacgcatagtccccgctccattacataatatcaattaatccgtgcaccccacacacacattatagacagatactggatttttgactcttattttaccgacaacttactcaatatgacacattttgtccatttttttttcatttttcaattctagtattcaaatcaacggttttatagtttagtttatctcatatcttttatcttttatcttctatcttttaattatttatcatttatcttcttttatcttcttttatatccaacaaacaaaatgtgtggtattttcgcagcttatagagtggatgatatccaaactttcaaaccaaaagctttacaatattcaaaaagaattagacatagaggtccagattggtcaggtaatgttgtagcaaattcaacaattctttgtcatgaaagattagcaattgttggtttagatgcaggtgctcaacctattgtatcaccagatggtagatatactttaagtgttaatggtgaaatttataatcatattaatttaagaagtcaaattaaagattatccttttaaaactttatcagattgtgaaccaattattccattagttcaaaaatatgatattgatgctccaaaatatttagatggtatgtttgcttgggttttatatgataaacaagaagatagaattattgctgcaagagatccaattggtattacaactctttatatgggtagaaaatcttcaagtccaaaaactgtttatttcgcttctgaattaaaatgtttaactgatgaatgtgatgaaattaaagctttccctcctggtcatgtatatgattcaaataccgataaattaactagatatttccaaccaagttggtgggatgaaaataaaatacctgaaactccacttgatttaactttagttaaagaaactttagaaatggctgttagaaaaagattaatggctgaagttccttatggtgttttattatctggtggtttagattcttcacttattgcttcaattgctgcaagagaaactcaaaaggctgctgcagctgaagcaaatgttgcaattgatgcaaatacaactcttacaggtgttgatgcaaagggtaacctttcatttactggttggactaaattacattcttttgcaattggtttaccaggtgctccagatttaattgctgcaaagaaagttgctgaatatattggtactattcatcatgaacatacttttacagttgaagaaggttttgatgctttaactgatgttatttatcatttagaaacttatgatgttacaactattagagcttcaactccaatgtatttattatcaagaaaaattaaagctcaaggtgttaaaatggtcctttctggtgaaggttctgatgaaattttcggtggttacctttatttcgctcaagctccttcagcttcagaatttcatactgaatgtgttaaaagagttaaaaacttacattatgctgattgtttaagagctaataaatcaacaatggcatggggtttagaagctcgtgttccattcttagataaagaattcttagaagtttgtttaaatattgatccaagtgctaaattaattgatccaaaatcaggtaaaattgaaaaatacattttaagaaaagctttcgatacaaaggatgatccaaatgcaaaaccttatttacctgatgaaatcttatggagacaaaaggaacaattctctgatggtgtcggttattcatggattgatggtttaaaggaattatcagaaaaatcagtttctgatgaagaatttgcaaatccaaaacctgaatggggtaatgatattccaactactaaagaagcttatttctatagatgtaaatttgatgaattattcccttcaaaggctgctgcttcaactgttatgagatggattccaaaggctgaatggggttgtcatgaagatccttcaggtagatatgctaaaattcatgatgctgctgttcaacattaaaattttatttgattattctttataatattaataatatacaatttctataaataatttttttcttaattaataaaatacataatataatttcttagcatgattaattaaatctttgtatcaattatacatcctttaataaatttaaaacctcttgcatctgtttgttcccttgtaacaacatcaactttataatcaataattttttcatcattaatttcatcaatttcttcattaagatcaaattcatcttccatttcaatataatcaatattttgttcaatttcttcaaaatcaggtgctaatgcactccatttttgtaatggtttaaccccccacatgaaaattgtaccactatccattccatttgcacaaacacaacaaacattaccattaattgatctagttgcccaatgaacatcaattaattcttcatgtgcaccttctaaaatttgaactaatgatcccatacttgtttcccaaacataaacatcatgtgcagctccactaccaccctgtgatgatgcacaaacaaattctccagttggtgaaaatttaactgtattccattgaattctattaacaacatcttgatatttttgttcaatttctaattcaaatgttgtatcttctttataccaattacttatatcatattgtttaattattctatcacttgaattaacaattaatctattaattggtacattgtttaacccaaataataaatttgattcattatcataatatgccttttcaacaatttcaacacctttaatattaccattacaaatcttaatattttttataacctttaagttttcaatatcaattatttgtaaccatcccatacttgtacctgtaattacatatttaccattgaaaaatgagaaacaacatagtgaaactccaatattttcattacctacatcaatatctataatttcaccatttttaacaatacaaattcctccatcaactttacaaacaataaccatccaattatcccatgttaaatcttgtttaattatatcaacattccaaacaccacctgtaaatacattttcccaaattaaattaatttcagaattttccaattcatgaatacaaattttccaatctcttgaccatgataataatccacaatagttttcattataaatccatcgtagtccagttattggcattgtatgtgatttaattattgtagtaacattatttgtccatgtatcaattattaaaattgtaccatctaataatcccgatgcaatataatgtccacatggcgaaaattgtaatgatgttgaatgtccatatgataatgtcattgttaatgttgtaggatattccgccgttataaattgtggatcatgtagggataagttcattgtcgtgtttgtcagacaaaggaccaaggaatcaaataatcaaaggataaattaatgtttttgatcttacacgtagagtgaaaaattaaaaataatttaatcggattttaagataacacagttctttaacgatagctagaaaaatttatttataaatacaaaataaaatgaaatgaataagagagaaaaagtaagttagattaaactacaatgaacactacaaccttctttgtgcatgtaatgaattatcatcataatattcatcatcatcgtaattgttattatgatgatcattgtagaaatgttcttcttgaacaggtgatgatggatgaatattagtaaaatcagttgaattgattctttcaccgtaaacacttaaaccagctgtattatttgtcaatccacttagatgtgattcatttctattatgagagaatggaatttgaacactatctgattcaaaaggattttcttcatgtggtttaaatggatttttggtagtatcaccaataactgaagaatctagtgaatcacgatctgcattaatttgattatcattattgttaatattactactaattggttcaatttcattgttgttatttttgaatgatttatttctacttaataatgatttaccccttgataaaaagcccgtaatacctcctttttgagtttcagaatctgatgaattatttaaatcattatttgtaagtaaattagtttcagaatcttttaattcaggtgaatcagcttccattttttgattatgcatatcattttcccaattatcattatgatctcttgcaaccatacctaattcaaataattcatttgatgatacattatcagtatttaatgattgatgtttacgttggaatgaagttctatcatcttttgttggagaaaatttagcatcaggatttttagagaaaattgtaaatgcagctaataataaaatgacaattaataaaattaatgaaactgctgcattcataataaagaaaactaaacccataactgatgcaactctaaatggttcattatagatacctgagaaaaatgtgaaaaagaatgaattaattgttgtaataacttgaatgaaaatactcaaaacatttgtaaatttatccatataaggtaaataatggcacatcaaaccaagataaaacatatctaaaatccataatgccattgcttgagttctacctgatgattgtgcaagaccaacaaagaatgatttaacaaaaatatatgataatgaaactgcacaaaaccaatattttgtcgcatttaacattgtatataagaatccataacgacttaaaatttcaggattaccataaagtaaagccgctggattaccatgttcatcaattgattttttaccatatctaataacttggaaacatgcaaaacctaaagttgataaagttaaaattaagaaaaaaactgcaattgtgacaactgcacctgaatcaacttgtgtgaattcatataatgataaaattaataattgagggtaaccaatgaaaatatatcttgctaacatacctttaaaagttggtctccaatcagttctatattcaatatttttattaatccaatttgccttttgaccctttgataaagttttattaaggtatctataaatgaaaaagacaccaattaaaacatataaacataagatgaaaaatgtaaaacctgtacaaacaattgaagaaggttcaatatttgaatcaaatccaatacgtttaatacctcttaaaacagttaagtaatcatttgattcaacatgagtcattggaataaaccatttagtatcttgatcagcatcacttcttggattaatggatttagtgtttataattgaatcaatattaaaatcaaaatcatcatcataaccataatcatatgaataagaagaagaagatgatgatgataatgatgaggaagataaaccaaataatgatccaattttactaacaaaatttgaatgtgatatataatctattgaacgttgagttaaaattgatttaacaccacttgttaaaaattgagttggtgtaccaccagttgcttgaacaaaccaacggaatattttttgcataaattcaattctaattaaacccattgaccaagctaaattttctgcccaagaattagcaatcattggaacttgatcagctgaaaccattgcaataatgacaacactttgaaaataagtaaataaagaaattgcagcagctgacattcttgaagctgaagctgaattaccgaaaattgataataaagcagaaattaataaacctaaacctgcaacaacagctgtagcccatttagcaccttcatgagaaacatttttaccattatcgaaagaagcttgtaaacaacctaataaaccattattttcatcagttataactaatcttgcaactgcatctaaattagggaaagtatatgcaatacctggaattttatcaacataatcttgtgaaatatattcaattgattcaacttccatatgagatggagtaattggacaaaattgttttaaatttaaattacataaatcaacagtttcatgaataatatcaaaaccaaaagcataaacagttgcaaaagcttttaatttaccttgaatttttgcagtaagtgaaatatcataattaattgaacgtttttcagcatcgaaaacaacattaaaataatttggtataatatcactattatttttcatacagttaactaaagaatttgaatataatcttctttcagcatttgtaacatttgataatgataatattaataaaatgaaagatattatcttaaaatgtaagtttgatatgctattaaacatattgtattgtattgtttgttaatctaattttctttgttaaaatgagtaacttatcctaagatatatataactatagagctaagcaggaaagtgagtagcctgatgagaaggagatgaatgaaagtatatcagaaaagaaaaagaaaagaaaaggtgataataaaaaaaagataatacaataaacaatcaccctagtaaaagtcatcttgctcagttacataacagatcaaatcaacaaggtgagggagaggaaaaagaaaagaaaagtttttattttcttcatttggttgtacgtaatcatcaacatgattattaatcatttcatttcattatttcatttcattgacattaaataacttatataatataaaagaagtagaggaagaagtaaaggtataaaacaaacacaaaaagaaggaaaaaaacataaatattagaatcatttcttcatatcatgaacaactttaataattttagcaacaacatcaggatttgataatgttgaaatatcacctaattgatcttcttcaccagctaaaatttttcttaagattcttctcataattttacctgatcttgtctttggtaaatcatcaacaattaaaattaattttggtgcagcaaatggtccaatttctttacgaactgttaaaattaattcctttttaattgaatttaattcttctaaatttgaaaaattcttctttaatgaaacaaatgctgcaactgctgaaccagttaattcatcagggaatccaacaactgcattttcactaactaatggatgttcaattaatgcagcttcaatttcagctgttgataatctatgacctgatacattaacaacatcatcaactctacctaaaatccaataaaatccatctttatcccttgcacatccatcacctgaaaaataatatccatgataaggttttaaataagtttctaaatatctattataatcattccaaattgatcttgtcattgatggccaacaagttttaatacataaaacaccttcaacattattaccctttaattcttcacctgtaactggatcacaaattgctggttcaataccgaaaaatggtaatgatgcactacctg

SEQ ID NO: 27 - DNA, 3033097 bp, Pichia kluyveri (residues 1,516,550-3,033,097 of 3,033,097)
  >NCYC246_000000F P_kluyveri_NCYC246_TS
cctttgttggtgttatacctgctaatggacaaattaaatgtgaaccactttcagtttgccaataagtatcacaaatatgtgctttatttctaccaataaattcattataccattcccaaacatctttagcaattggttcaccaactgaacctaaaactctaagtgaatctaatttaaaattttcaatatatttttcaccagctcttttcaataatctaagagcagttggtgcaacataaaattgattaactttatatttatcaacaatttcccaatatcttgaaaaatttggataagcaggtgtaccttcgaaaacaacagttgttgcaccatttaataaaggaccataaacaacataagaatgaccagtaatccaaccaacatcacctgcagtgaaaataatatcatcttcatgaacatcgaaaacatatttagttgttaacattgcacctaaaagataacctgcagttgtatgtaaaataccttttggtttaccagttgaacctgaagtatataaaaggaataaattatcttcactattcattggttcaggtgggcaataaggattatatttaataacttcttcatgccaccaaacatctcttttagaattccaaggtatatgagaattaccagttctcttgaaaacaataacatttttaacatcaggacaatgaattcaaagcatcatcaacaatttttttagtttcaataattttaccacctctcattgattcatcagttgtaataacaattttagaattagcatctaagacacgatcttttaaagaagttgaactaaaacctgcaaatacgactgaatgaattgcaccaattctaataattgccattaatgcaacaattgcttctggaatcattggtaaataaacagcaactgtatcaccctttttaacacctaattttttaaaacttgagcaaatttacaaatatcttttaataattcaccaaaagtaataattttaccttgattaatttcatcagcttcataaataattgcaggtttatttggatttttaatgcccatctatcaacacaattataacaagcatttaattcaccatcagtaaaccaagcagaaggttcaccattattatctcttaaatgaggagcattagggattttagaagttgtaaaaggttttgaccaagataaattttcaattgccattttaccgaaaaattcagcaggattttcaattgattctttatacattttttcataatcattaaaagaagttaaatgaggttttgaaggatgtctttcaaggaaacctgaaggaacttctaaagcatcaatattcatcaaatgttcattctctaaatgagtttctggcattttgataagttaagttaatttaatatagtatagtatagtattgtttgattgatataaataatagataagattattaaagatatgaaataaaggagatgagccaagttaatataaaatgggcgaatgataagatatttataataaattacattaaagaaagatctttaatactactactacattaccccacatgaataaaagaaagggtcccacccacttcagagaattaaaaaagggtaaatctgttagctaatactatagtaatatcaaagtaatatcaaagtaaaggtaacctactgtaatagtaaattccagtcatccgttgtcaaattgtaataaaacatgatgatactgttaataagaagagccttctctaatataagatttaaactccgctccgaatcggatgcctggagagaggggttagtattattcataataatatattacgtcatcatactattattattattatcacgtgacaagcgacgatgcgactgtgatatttttttcagggcttttgatggcttagcttattatcattaaactactaaatgttaaaaatagcaacttaaaaaattcctcagtgaaaaaaagaaaaaacgcgttttctgctctactactaagagatattagttaaatttatggagagaggctgattttgtattgtatttattatgattattattattgtgatggtgatggtttattttattttattttattttataaatatcttattttatctcatttattcttctatctatcttcttcctaatctcactagacaaagatgatctttcgtaatttagtatcatacatactactaatatcattatctataaattcttcaaatgctttaaaatatttaagatcaaatactttacttacttgtatggaaaattctgaatttagttcaactttttttgatgtttattattatcctcataattcaactgctgttttcactgttgatggttcatcttcaatttctggtaaaattaaagctcattttgaattagttgtctatggtttatctgtttatcaagattcaatagatttatgttcccttaattatccaactatttgtccaattagttcaggtcatattaatttagaaggtacttatacaattaaatctgatttaactgacaaaattccttctgttgcttatactataccggatttagatgcttatgttttagttatggtttattcaactgatgatgatgataatgaatctcctctagcttgtcttagagctgaagtttcaaatggtaaaactgttcaaactagatatgcaggttggccaattgctgttatttcaggttttggtttagtagtttcctcatttgttactattttaggtcattctgcaactgcttctcatattgcttcaaatgctgcatcccttttcatttatttccaaaatttagcaattatggcaatgatgggtgtagctagagtacctccaattgctgcttcttgggctcaaaattatatgtggtctttaggtattataaaggctgattttatgcaagatatcatttattggtatgttcaatcaactggtggtgatgttagtgatgttctttcaaatagagatataatctctttatcaattcaaaaattaaaacattttgttctcaataaaagagcaattacagcagctgctccctctgctgatgattatttaactgattcaactctgtattataatgatgaatataatttaacttcaaaaactttggttttaagaggtattcaaagagtcgcatttttagctgatatcgaaatttcaaatgttttcatgacaggtattatcttcttccttttcattggatttgtacttattttcttaatctctatatttagaggtatttgtgaaatcttaattaaatcaggtacaattaaaaatcatagatttgcatattttagatcaaattggaatttaattatcaaaggtgcaatttatagatattttgatatcacattttcaacaattgtcttattatgtgtttgggaatttactcaaaataattcaagtggttgtttagcatttgcaattataatctttggtgttgtaatgattttaatgagttatgcaacaattagaattttctttgaaggtatgaaatcaattaatcaatatcaaaatcctgcttatcttttattcggtaatgataaattttattttaaatttggtttcctatatgcacaatatttagcaagaaaatattattgggttgttttaaatttcttttatttatttattcgttcattattaattgcagttttacaaactaatggtaaagtttgtgcttgtattatttttgcaattgaaattattcatacagttgttgttatttggtttagaccttatatggataaacgtacaaatatttttaatattttcattgcagttgtcaacttaattaattcagtctttttcctgttttattcaaatgttttcaaacaacctccagttgtctcatcagttgctgcatgtcgtttattttattcttaatgctatttttgcattagttttattaatttttacaattgttacttgtacaattgctttattacataaaaatccagatgttcaatatcaacaagttaaagatgatcgtgcagcttttatgacatttgaaaataatgttaatcaaaataaagatttagaattatcagcattaggtgaatctgcaatgcaaggtcaagatcatgatgctttcttttcaaataaagaaaatgaaaaaccaaaattatctccatatgaaattgaaaatacaaatagtaaatcacatcttgaaccttataatcctggattatagtaatgatagtatgaatacaaataatagttctaataataataaattaaatccatttgctgcaaatgatgatgcttcagttgttagttcaacttcttatgatagagaaaatccttttagtaataatcatagattaagaaatcaattataattatcatttactatcatttactattattaattctttactaaatttatttaacttttattttgtttgtactttatttattcaacgtttattactttctttttggtgtttatttatgtctgtatattttttatcaatattaaattcattgaaaaaaattaaagtttcgcattctaacaattaatctacatctttctttccctatggatgataggaaggatagtactgagacgaataccacttgggatagtttagatgatgatgcagtattgtcatttattaataaattagattctcataatcaaattaagaaaaataatgttaaaaaggaagttttgacagatatcgataccgatgtagatacagaaaatgatgatgaacctgaattaaatgataaacctcaagaaggtcaaagtaatgatgatatgttatatgcttcaatacgatcatcacaatggagttcaatgaatgattcaaaatttatcaattatgttaacaaattaactcaatcaaaacaatttgatacaactattgaagttgaaaatacttcttataatgatgttcaattattatcatctcctatattacctggacaacgtaaaatagaaatcgagacaagtgataataataatgatgatgatgataatgaaaatgatgaaaatgatgaaaatgaggaactaccatatgatcaatacgataattacgaagattattttgctgaaaagaacagaaaacaaaaccttcaaggtgaagaattatcaaaatttttaaaagctaatgatgattcaggtaatgattatccaccaattttcaaaaattgtgcaattcatgttaatggtagaactgatcccgatattttacaattaaggaaattaattttattatatggtggtaaatatgttcattatttatcatcaaaacgttcagtaactcatatagttgcagaaaatttacccccaaggaaaagaattcaatttggtaattgtaaagttgtttcacctaaatggattatggatagtattgaagcaaaaagattattggattattcgttatataggattgaaaagttgaatgattatggacaacaaattattaagtttcctaaaagagatatagttgaagaaaatggggagattgttgatgataatattgatgatatagataatgatcaattaagtcaagaattaagtcaagaacttcaaaatacaactcacccaaattttcttaaggtattctttagtaaatcaagattacatcacttaagttcttggaaatctgaactaagatccaattttattaatgaagcaattttagctcttcaatcaaagaagatcccacaaaactcaccacaaaggataataatgcatgttgattttgattgtttctttgcaactgtatcagcaatgaaacataatccaccaatagatattaatacagtaccatgttgtgttacacatggtggtaaatcagcagatattgcatcttgtaattatattgcacgtcaatttggtgttagtaatggaatgtggttgagtaatgcaaaagaactatgtccaaatattgtttcattaccttattattttgaagaatatgaaactatttcaaaaaaattttatcagaaattattgtcaatggatattaatacaatattaccagttagtattgatgaagcattagttgatatatcttatctttgttcacagggtgatcaaaatgtggaaaaaatagttaaaggtattaaagaagggttggatagtgttacaaaatgtactcttagttgtggagctgggagaaatgttttgcttgccaaacttgcattaagaaaggctaaaccaaatggtgtctattatatctctgataataatgaccaaattgatgaatttttgaaaactgtcgatgttaaacaactaccaggatttggtaaaaagctttaccagaaattgaacacattttacccaaataaggaagaaataacagtatcagatttgaagaaaattgataaatcatcattaattaacacatttggagctaaaatgggtgcaaaactatatgattatgctagaggtattgacgatgtatcaattgatattttaaaagatactgataaatatacaagaaaatcagttaatattgatgttaattggggagtaagattcagtactgatcccgatgttgaaacttttctgtcaagattagcaaatgaattgagtgaaagattgctaaatataaaaatgattggaacgtcaataacattgaaattatcaatacgacataccgatgctcctattgaaccaactaaatatatgggaatgggtagatgtgaattcacttcaaaaactgctaaattgggtgtggccactagagattccggtgttttaggttcagagttgaagtatttatggaggtttatgaatgttgaacctaaagaattaagaggtgttggagttagcatgaataaattaactcaatgatgattataatattgataataaacaaatgaagttaaactttacttctaatgtaaatctgaaacctcctattaccaataaaagtccatcaccagagagttatcattcaccagttaaaacgtcaagaagtaggacaggctcaccagtaaaagatgatccagaggagcaaattgattgggatgtgttcaattcattaccaccagatttacaattagagattaaaaatgaattaagaagaagaaagttacaaagctctccgaagaaacgtaaattatattgcaaacgataaagatattgctaatcttctttcacctaagaagaaaaaactgacaatggaattagaaaaggaacaatatttatcaccacataaaatcaaggaacaaaaacagaagaatatagtgtttcaaggtattcccgttacagatgaatcaattcttttaaaaaattagttgcttggatggattacacattaatcgataataatgagctaaatgagaatgatcttgaactattccgtgattttatgattcaaatactgtcttcaagtgacactttacgctttttacgaatataccaaacactgaaacgaagaattttgatctctcccattcaagaatccaaacaatttaataaatggaatgaagaattagaaagtcttaaacagttgattggagaacagccattatctgattttcaatttaagttctaaatttctctaaataatctacttattctatataacacaccttttaaaaatctttaacgattaatgaacttggagctcttaacccccattcagtccatgaaccatcatacactgcaattttacttgaatcgtaaccagccaattgcattgcacatctaacaacacatgcggtaacaccagtaccacacattacgataactggttttgaatcatcagaaattttatttttaaaaatattcttcaatgacattgttgataaaaatgatttttctggagttaaaagatctgtaaatggtatatttattgcatttttaatatgacctgatgataaacctggtcttggttcaggtgcttcacctgaaaatcttggagctgatcttgcatcaattaatgtatattcagaaccaatcttatcattttccactaattctaataattgttcataactgacaactttaaatggatcaaaagtagcagtatattcacttggtggataaggagttggtgaagtaactaatgtattatttactaatgtatcagatccatggaccttcataactaaatttggatcagaatgtgattttgtgtaagatgggtatgtattcagtatatataagtttagagacatcatgaccaaaaatttcaaacatccaaacagcacgacataaactgaagataccttgttgatcatagaataataaatttgaatcatttttgatacctaattccctaactgatgattcaaaatcttcccttgttggtaacatatgtggatatttagatgtgaaatctttaactttttcaatatcaaaaaagacagcattatttattctgcttttcatgaattcatggtaaccatttactggaacatttggcatataccaagatgaatctactggtattattgaatctggatgtttctgatagaatgaagctacacttgcatggtgctaccaatgagatcattcgtttgttaaaatgtatttgaaaacttcagagatgattgaaagcttgtattcaacattgataaaaaattttttttcttaggttactgataagaaactgaatactaataatagttatataccactctaataggggtcttgccgataacaattgtccatttgagggtttcgtataaaatattaggaataaattcaaaatcaactgttacaagcgggtttacgtaatcacttgctatttttctttgactttctcatgttactgaaatgaaaacatgaaaatcggaggactcacagtaactgcaagaggagtggtgtgtaagtttcttgtatattacacaatagtgcttgtatcgaagcatctatatttttaacgcacataatggactattctgatattttagggaatggagaggagatggaagaaatacgtgatactgattttgattcagttttgagtggtcaaattgcaactttcgaaaatatgtttgatggcaaaactgaacatgctgagaatgccattgatttcagtgatgaagatgaattagcagaagaagatgaagaagaagaatctcgaaacaaggataataatgataatgatgataatgacaacgataaataatgaggaggaggatgacgatgaagaagatgattttatgaaagaattacaacaagaagcaatggaaggagtggagaaacctggacagaaagaggagactgaaatgaatgctgttttaggattaggtgttcccggtcatgtaggtttgcaagatttggattttgcatcaaactcactcttagattcaacaaaacaaattggtgattcagatatcgaattatctgatgatgatgaaagtgaaaatattaaaggtgaaacattcaataaaaaacatattaacaaaaacgatgaacatgatcaacaacaaaaattaattagtgatgaagaaagaaaaaagagaaaggaagaagagaaacgtttaaaagaagaaagacgtgctgcaaggaataagaaaattgttaagatacttttcccaagttttgaaccaggaaagagaatgcaattacaaaagcttttcccaattataccattagaatatacatatcaacaaccaccatctgtaactgcaccactattacctaaaaaaacattttttgaagttgatgatgatgaactcactgagtttaaaatttctactaaaaaactcaaagaatataataaattgaataaaagatctaataattttatgcctgatgctcgtatcattaatatccaacttgaggaagattcacaaactgttgaaaccaacgaacctaacaaacgaccaatcacaaaaatttcttatgatacagatctcataataacgacagctgattgggatgatgataaaatattcaatgttaacgatgaaactataaatttacctgaacgtaaaagacttaaatttgaagcaagtaattgggaagattgggttgatgatgacgaagatgttatttttgaaggtaatttagatttagatgctataaatctgaaacttgatatgaatgatccaaacttaatgttaattgatgattccaaacaacatcatgtcaaaagcatacatatcaataatgattcaagtatacctactacccaaaaacttttggaacaaaagttcagtatatccaatgataaggaatatgatttattgaaatcaaatacacaaataaaggtgagagctaccataggaactatgaatatagagcatgctcttcctgctatcagattacaatcaccatattatcaagttaatcctcctattaaagaaaaaagaggataccatagaaataagtttaatgttagaacaaatgttagaacatttttttctaaaccaagaactagaaggaggaagaaagatagaggaaaggaaatttcagaaattttcaaaaattcaactgatcttaccttaggtgatactgctccatttttcctgtgtgaatatagtgaggaatatccagtatcattgagtaaatttggtatgggtaccaaaataattaattattatcgtaaaataacagatgatgataacactagacctaaacttccaatcggtgaaactcaaattttgggtgttaatgatagatcaccatattggaattttggatttgttgaaaagggtagtatggtcccaacattatataataaacgtgcaagagctccgttatttcagcacgaaccactttcaacagatttcttattaattaaatcttccggtggtggtaatggacaaagatttttcttgagaccaatcaactatatgttcaccgtaggtcaagttttacctgctgttgaaattcccggtccacattcaagacgtactgcacaattgttgaaacataggttaaagatgattgcattccgtagactgaatgcaagtgagcatactagaattgctgttaaagatttatctgaacattttccaaatcaatcggatatgcaaataagacaaagactaaaggaatttatggaatatcaaagaaatggaccagatcaagggttctggagattgaaaaattctgataaattattagattatgatagaatcagaagaatgttatcaccagatgatgtttgtatattaggatgttatgatgtcaggacaacaaaaatttgatgatctagatatgtttagaagagagagattacaaagtactgatgataaaaaagataagcctgaaaataatcaagatgaaacaataagtcaacaagcagcaccatggaatactactagaaattttatacaagcaacacagggtaaagcaatgattcaagttcatggggatggggatccatctaaaactggtcaaccattaacatttttaaaaatttcaatgaagggagggtttaataaaaatcttgaaaactcatcaaagggtggtacaccaataaacattagtcatacaccatcatcaaactaatacatatagtacaacagctcaacaaagattatatgaagatcaaattagaagagcatggtataaacaagcaaataatttatctaaatatagaaatacagataaaccacgtattgtcgaactagatgaattaagtgattcaagacttatgataaatgctaataaagttgttgatgaggaagttaatgaaaaaccaagatatattaagattacacgtatggttaaaaattcatacggtattaaggaaagaaaagttcaaattgttaaagatccaaaagttgttgaattatatgtcaaaaagaaacaagaacaactattacaatctagtggtagtgcagacaataatatggttattataactaatgacgaagaagaaaatatgaaggttaaaaaacttcttgaagaagaattagctaaattagagaaacaagctgaaaagaagaaaaagaaacagccgggtattacagcagctaatattgatagtgaaggtcgtcttagtggtaaaggtattggtaagggtaaatccactagtagacgttgtgcaacatgtggttcattgggtcatattagaactaataaaacttgtccattgtattacactattcacaataaatccaatcctaattatattccaggtactgaaacacctcaagagcttattcaaagtactgttaaaccacaacctggtaagtaatgtgtgtattgatctatttctagttgtataggtattgtcatagtaatgtatgaagatattacgtcagcataaattttaccattcatgcatgcatgtgagaagttatcaattcagtttgacctttgataaattgttgatctttataagattattcgtaattgaacagtcaaaaagaagtaacaatggagagtacacgtaaagcaatacgtgtttttgatgcgtttcgtaagtattgataaagaattatatgaatgatgaatgatatactaactgaatacacttttttaaaatattatagccaaagtaccaccaagtgatacagttggatcatatagaggatcatattcaacatttgtaacatattttttcatggttttcctaatatgggttcaaattggaggatatatagatggatatattgatcatcaatattcagttgatgaaattgtaaggaatacattagatttaaatattgatatagttgttgcaatgccatgtaaatatttagatgcaaatgtacgtgatgttagtgaagatttatatttagctgaagaaattttaaattttgaaggtgttaatttacctaatgcattttggaatatggcaaaaagtaagaaatcaacaattacacctgatattgataatgttttatcaaattcattagaagcagattttgttgcaaagggacaacgtcataatttagaattaccatcatgtagaatatttggtagtattccaattaatagattagaaggtgatttccatattacagctgaaggatatggatatagaaggccacaagttacacctgaggaattacttaattttacacattttataaatgaattttcatttggtaaattttatccatatattgaaaattcattagatggtacagttcaaaagacaagtaatggtagacatacatatcattataatttaaaagttgtaccaacaatttatggtaaattaggacatgaaattgatacaaatcaatattctgttagaatgtatgaaactgataataaatattcaccaggtattttcattcaatatgattttgatccaataaagatgtcaattattgaacaaagattatcattttttcaatttgttattaaacttgttacaattattggaggtttatgggttatggcaagttggttgtatagatttatggaaaaaattataattttaacatttggtaaagaatttgcaagacgtggagaggagaaaaaatctggtttattagatgatccaattgaagagtatgaaagtatctaataatgattttattaataaaacgaatacattgtaatattaaatgcctggtatataatatatagtatagattacttaaataaacaaacaacttttaattttaataattatttttgtaacagcattttagcttcttctttatttgatacagcaggaacgaattcagtaaatctataatattcatcatcatcaaatgtaataatatcccaatatttataaaccatcatataacaagccatcattgatatactactaaatagtgaaccatcaacataatgatttaattgattacaaattttatcactaactgcatataataatatttgagatgcagcaaaaaatagagttgataggaataatgcacctaaagcccaccaattgaaaaccaatgtaaagcaacaaataaatatttgagataataagccaaatacataacattattgcatttaaaacaaaataaaacacaaataaaggagttgtatgattatgatttaaacttgaaccccaacctttaaaagtgaaaattgaaattaaataattaactatgaaaacaaatattgaactaattatcaatgataacattgccttaaatgaaccatcatcccaaaaattaaaacttgaaaaacctgcaaataatagtgaccaacaagaaactgcaagattagcaatttggaaacttacaaaataagcataagaagatgaaccaggaggtgaaacacctgtatcaataattaaagttgcaattgtttgagatacttgaaatccaaaagaagaataacatttccttacgagcaactgaagtatatcgtgatctaacattatagattatcattaataagacaatcaaattacctatattaataaaagcggtacctacttcaaatattaaagtatttgcaatattaattgatctagcataacaagttggtaatataccattgaaaggataatttgaaatagtttgaagatgatgaagaagatgatgatgtttgtaaaggtcgtattaaagagcaaataggaagtggtgatttctcacaaatagaagcaaagtctccaaataccatttgtattagtatttattggttatagtgtagtatcaacttacaaaattaaatgaaatacagatcaaagtaataccctctttgttctaagggaacattctatattactttttttttcatcatcgataaataatttattacgcgtttgatatagattttgtatagatctggtttgattttctgtgaaaattattttattttatactatgtcatgagaactatttcttttttgtattttttatattcacagaaaaatttgaaaaccctttcgttaattatctctaaaatttctaatcttcaaaacagagatcatataagttttaattaacacgttccactctacatgcagagaaaaagccccaattgactaccaactaccacccgcgcatgaaaaagagaaaatcccaaaaaggcaataatggagaaaaataaactcgaagcgacgcatagtgaagaaatttaaatttaaatttaaagaaattttccaaattttgagaaaaagtgaaatttcagtgacttattttcatattattgtttgatagtgtgttgataaatgattaattggtgattatttattttatcgtatttctgtcttttatcttattcttatcatcctctcttctctcctcttcttttagcagagtaactatataatgagtcacgttgataagaaacaatctggtttagctagaatcttaggtcctgcagttgctggtgtctgtgaaattggtgtcttccatccagttgatactatctctaaaagattaatgagtaatacatcaagagttaatactttagataaattaaatactgttattttcaaagataaggcaaatgctccagctggtaaacgtttcctttcacttttcccaggtttaggttatgctgcttgttataaaattttacaaagaatctataaatatggtggtcaaccattcgcaaatgaatttttaacttcaaattttaaaaaatcttatgatgatttatttggcccaaaaactggtaaagctttactttctgcaactgctggttcccttatcggtattggtgaagttatccttttacctttagatgttttaaaaattaaaagacaaacaaatcctgaatcttttaaaggtagaggtttcttaaaaattattaaagatgaaggtttctctctttataatggtgctggttggactgctgctagaaatgcaccaggttctttcgctttatttggtggttccgctttcgcaaaggaatttatctttggtttaaatgattattcatcagcttcttggtatcaaaattttatttcttcaatttgtggtgcttcagcttcattaattgtttcagctccattagatgttatcaaaactagaattcaaaataaaaatttcggtactaatgaatcaggtttcaaaattatcaaaaacatggtagcaaatgaaggtataacttcattctttaaaggtttaactccaaaattattaacaactggtccaaaattagttttctcatttgctttagctcaatctttaattccagcttttgatagagcattaaaataattttaattttatttcaatctgaaacaaatttcttgtaaataatgtattaaaatagattttataattaaaaattatatagaaagacatctaataacctaattccattttaatcgaaaaaaaaagtaatatgatataatatttattaattaattattgtttttataatttatttacatgatatatttatattaatccttatacaaataaactaattatcagttttagtttcagtttcagttgatttattctcagattgatgttcatctaacaatttttctgcttcctttaaactcttttcattattttctctctttatttgatctgctaattgttgtaaatcatcagtaaaaccatttaaataatcattaacttgttcaaaacctggacctccattaacattatccattacaatattaacaatttcattatcaaatgtattatcactctttgttgcatttatacttgatgaacgtaaacttgaaatatattcccatgattcatttgctgtattattaaatgctgaatcaaccattaattctaatctctcttccgttatagcaaaatttgatgctccattataaagttcaaataaactatttgctctttcttgatcaatcttcaatttagtttctaatctattagattctctctttgatcttaaaatttcattttcttcatcagttcttggtctaactaatggaccttctaaataactttcaactgtaggtgcagtatataattcagcacgtgatgctttatgaagtttattctcaagttctgccttttcttcttcaatcttaattttagcaacatgttcttctattctttctaatcttttgacttcagtttcataagattccttcaagtattcccttctcattttagcattttttattttaaattgttgtgaaattggcattttagaaatttcttcatcagtatattctctctttggaaccattgcagattttttcaataatttttcaggtgttgaaacttttggtaaaatataatctcttgaaatcttctttggatgaagaattccatctgcatatcctgtatctgttggtttcttataaacttcatgtttgaaaggttgtttaaaaatttgctttggtctaggtaaaagtccagactttcctgtagctttcatcaatcctttagccattctgttatatttaatgagttgatgaaattaaagggaatatgttccaatctaaaagaagtagatatctcttcctgtcttactctacattgtattgaaatactgatattttttcatgaagttgaacctcgacgttgtgaaaaaatattgaattttgttactacatgaattactgagagagagtcccgtcgttttgccatttacagtaattattgtttatattgcatctctttaactgtttcttctctgtgtttcatatcgtaatggacggtaaaagaagggttgtaagtgagaatggaatcttacagaatattggactacataatgatcaatctatactgtcggaaagagaaatagcagaactaaatacctccatactacaatatttaaaaccaattttacaaaaggaaaggcacatttatcatattttagaacaaaaacttatagacacacaatcaaattcattacaatattcagatctaatacccaatgaaatatcggagaattatttacagaaaaaatggtcaaatatcattaaattacagaaaaatctacatgaattagagaataagaataaaattttagagaatagaaataatgaattaatgtcagtaattaatgaattaacattaaaattagagactaaatcaagtacagaatcattgaaaaagatagattggatacctaatacattaaaggcatcattaaaatatcatactgcatcaataactgcaattgttattcatccatttaatccatatttaatcacagcttcacaggatggaatgatagttttctggaatttacttgatttatctgaacctataacacaaattaaaacagctcatacaagttcaattaattgtttaaaatttcaaccaaattcatcaaatttaatttcatgttcaaatgatcaaacaattaaaatttgggatttatcaaatataaataatttaaataaaactccaatgaaaatattaacaggtcatgaacatgttatatcttcattatctattaacaaggagaatcccaatattttaatatcttgttcaagggatcaaaatattaaaatttgggatttacaaacaggttggacaattgataatataattggacattcagattgggttcgttgtattgattcagttggtgattatattatatctggatcatcagatacaagtattagattaacacattggccatcaaatacaggtattggtttatgtattggtaatacacaagtaattgaagatgttaaatttttaccattagaatgtaataaatatttagataatttaaagaatgatagtaatgatacagatattgaagataataaaatttatgaaaaattaggttataaatatgcagttagttgtggacgtgattctttaattaaattttggaaattaccaaaacctgaatttaatccaataactggtgatccaattgttaatagtattaatccatatggtgaatgtattttacaattaaagggacatttaacttgggttaaaaaattagaaattcattataattgtaaaaatttaataagttgttcagatgatggtactattaaattttgggatttaacaaatttaaatgattcaaatgaattaattaaaccaattaaaacacttaatgaacatggaaattttatcaattgtataacaattgctcaacctaagggtgaattaattgatgataatattagatgttatttagcaagtggaggtgttaatcgtacagttaacgtttgggtttaataaaaaaataataagttttatattcactttctctattatacaaaaaaatatacattttatattaattttagtcattacatttaaatttatttagtttttcaatccaacttttggcacattttttagaacagaatcttctcttaattgtaactgatttactaccttttagatcccaccattcctaaaatatctgcaactgattcaatacatggattattacatgaaccacaagtttcaccatttgtaccagaaattaatgaattcattgcacgtttatagataaattcattagttgattctttccaattaagtatttcactttctgaaattaaatatttagatatttgtcttaatgcaagttcacttaattttggtacaaatggtattcttgattcaatataactttgtttctctaatctatattttaatttattatctgattcatccatatctattttattattattccaatcattaaaacttccagttattatcataacacatatcttgtaatgttgtcaaacttctagataaaagtgatgcttgaactgatcttttactaatttgtttattactccttaaccaatgaattctactaaaaaatttaatttgtttatcatttgataaaaaataatttgttttaaattcatttgaatataatctaagtaaattttcatcgactgaataaaatttatcaactgatgtaaaaggtattaattgattaccagtgaattgctaaaacttcaagttttggtaaatttaatatattatgtggtaagaatttaaatttattcatacctaaatttaaagattttaaataaattgctttttcaatattacctgataatcttgcaattttattatttcttaatgtaagcatttctaatctttcaattaaaaaaatttttggattaattgatctaagattattatttgatgcatcaatataaataactggtttaattataccatcattagtacaatcgatataattttctatatcacttattgattcagataatgaatttaattttaaatcatgtaaatttaatgttaaaattggatttgtcggattaattggttgatcaaagaaattttcaattgctttatttaaatttgattcaccctttgatgaatttttaacaacaaaataatttggttcatcatataaagttggggaataatttgaaggtaattcatcattttcaagattataaccgaaaacatgaccatctctatcaattgcaaaatctattatataatcatctttaggtttaattaatattgaactatttgatcttttcaatgatcttaaattataatcatcataagaaactatcattctttgctttttacgtgttggttgttcattaaatgttgagccatgtcttgacagtggatgaattgattttttcaaatttggtctatgaaatttaaattcatttttcgattgtgaatttatttgagtttgtgataatggtaataaagttggtgatgaaggtattgttggtttaagtttaatttctgtattattcccattattaaaggaaaccatatcatcaaaagcatctgatcttaaatgatcatgtttattgaaaaaatcagattgtgattcaattattggtgaacttggtacatcaaaatttaattgattgattggatcactactaattaaatcgtcattagtgggatcattcattgcagtacttgaagtattgttttcattataatcattattgacaattaaactattttcttgtagaacagatgatgaactatttaatgcagaataataaaatgtccccttcttctcaggtatacttgatgatattctattatgtgatgggtattcattattattataattgttattgttatagttatctatttcgttattgtattcattattgtattcacttctatttcttttcatattagcgggtgcatttatattatgatcattcatcattattattatcatcattatcgaaatcatcattattgaaaatgtccttccttttatttttatttaaattttgagatgataaaatttccaatgggggtacatgttcatcaatacgagatttatcaaatgcgaatggcaataatgggccaggcatttatttagtttgtttatctaaaaaacttgaaaagaaaaaagttacaataaaccattaatttatcaacagttcatcagatgttaattcatctaataaatcgcctaaaaggggaaaaaattggtacgcgtctcttttattggagggcattttatcggtgatttgatgggtttatttaattgatatagagggtatataagatataagattaagaagcattttagataaagatgttgattagatttcaactactttaggacgagtaaagatcattgcacatgttaaacgtcttctatgacgaccatttggtttattatctgattgttgacattcaattgcagattttggttcaggtatattaatttgattatcattagtaatttcattgatattagaaattgaagggctaggagatggagatggagttggttcaggatctagatgaggaatatgatataatttattaataagatgagatttacgacgttctaatttcatatttttttcaaattctttagttttagagattatttgtgaacttattttattatttataatgttaaattcatcttcaattggtataattggattaaaatcttttaaattatgatgatgactaatgaaaatatgatgcatttcaggacttgaacaatgtcttgatcttattattttcttgtcagtatcatgttcatgttcatcatgttcatgttcatgttcatcatcatcatcatcatcatttaaatcttcgtaaattgattgagttggagataatggtaaaattttatcatcattatcattatcgttttctgaatcagatatagcattctctggaacaaatggtgggcttgtattatcattaatcaaagtattggtattatttttcaaagattttggtttataataaactaatgaaccaatcattggtattgaacctctattatttttcttaaatctattaaatatgaaattattattattgttattgtggtgatggctatgatgagtatagttattataacgattattataatgattattatatgaatgacctatctgtagttgatcaatatcatcgagtgaagaacttctataaatatgaaaattatgaatattattattattattattattatctttattatctttatcctttgaagtttgtaaatcatctaatgaattattattatcagtaattgtagtattaatactattaatactattatattgcatactttttgaatggtccatttgaatactttgacttggacaaggacttatagggactggagatagatttgatgaatcagtagagatattatcatcagctaccactagactgactcttctttgatttacagttgattgcatattaactgttaactttggtatatggatcaataagaaaaaaagtgaatgacagagataaaagttttcaaagcagagtaaattaatctatcaattaatataaatgatcataaatctctgttcctgtttaggcgggtattttatttttttaaataataaattccagtcctccccgcaaaaatataattttttcaatgagaattgattgattattctttctgtaaaagggtataaaaggtagtatataaaatagtatacgataaataatactgtactgtggtttacttactgttagatggtagcaattgtataaatattatagaaatgtatatgggaaatagccaaaagccaagaaagggaaagggtcttgtgatggggcaaattgcataataaaaataatttctaacaaaataaaaagagggaggcgctctttttttttattttttttattttttttttgtggggtgagattttattatgtggtattattactattattattattattgttgttgtacgataataccgatattgatatagagttagtgggcattttgatatagttgttaagtaaaattaatttatacgaaaatgacactactgattatggtaagtttgaaaaatatttcttatacttatacttgccttaattaaataatcattataaaagactcgatccaaagacctcaagcgaactttctagaaaatttccattttcaaatttcaaattttcacattgagtcgctcaaactgattgttgttggtatttaaaccttggacttttcctcttcttttttgagtttatttgattctcttttctggtttttaaactttttttgtgtttcttttgacattatcaactaacagtgggtaatcccctatatatgggtaaatcatatattttgatagtcaattgagatatgtcattatacacatcatttggttattatacaatttttaaggaaattctagtgtccaaaatgataaaagtgtcaaaagattcagccgtgatgcctggcaacttctaaatcactatcatggatttttccatttctttcagccatcattaaatcaaggattgctttggcttcagtatcatttaaaattgcattaacctgcttacgtttcttatctgcatttaccaccggacatttacctagattatgagtatcactaccacatttctagcatccttcagcaaatttctctggacaatagtaaacagcatggtttcttccacaaataacacaatgtttaggaactctgcttctacctttctttgatttaattcttttattgaccttgtgattgttaccagtaccacgtttcttattaccaacattattgttaatactatcaacatgattattatttgatatatcatcattggatctaataccagcaataacttgtttatccttggtaatttctttcaatacagcttctttatttctgataccagctaaagatctaaattccttatgttagcttgcttgtggataataaacacttgataacctccatttaataccaaattcttcagcaaaacgttttacctcagatgaaacaaaattagaagcattaccacttaaaattgttccaggtactggaaaataaccaaataattgatttaaaaccatacaaactgtatccgattccattgaattggtaggaacagcaaaacaataaccactaacatactcaacacaaaccgacatatattgtaccacagtcagatatttcgttgggtgtaccctcataccttttactggtccaataaaatcaatgtgccatagctcaccaaattgtggagttttcaccttttgcaatggtgcaggcaaagacttaaaagaaataaacaaatcacaatgtttgcaattttttaaaaggacaattggaaaactatggaatttagcatgccactcagcaaataatttcatacattcatcaattttgataattgaaaatattttattttcataaacaaattttaattcatcattgattaattgaaaattgttttttacttcattgtgacgactatctaaaacaccatttgatttcaacaacattaacatcctttccaaatcatcatcaaccaaaccattgaataacttctgatttcttttactaaaagggttttccaatttagcagcaaatctagtaactctgacagcattgaattcatcatttaaaacatctaaattcaattccggttgtttattaacacaaaaacgactcaaaaaattagcatgatttttcttactgggtaaatatttaataacaacaggataagtttataatgtctccaaaaatttcaagattcgcttgtctaacatcgaatgtttttgagaaatactaaccaaagcttgatgatcagtataaacaacaatctcgttcgaaagcaaaagatagttgttaaacaaagctaatagaattcctaataattctctttccaaaactgtgtacttagattgagtaacagtaaaacttttcgaaaagaaactaattggaaccgatttgacgtgtacagtttaaagttattataaaattaaccttttcgatgtatatttttaaaaagtttatagtttattcttacattgtgtaatacattgaaaaattttatttttaacattttgtacagttgaaaaagaattagctgatctagcttttagaccttgatataaaccaaaggtttctaaacgttgaaattaagtgatatcccttttaccacccattctttggataatattataaatataagtaaactgtatttttttttctaatataatttcaataaaataactaaacatgtggatttattcagaaataaatttgttcagcgagtctttagtaaatcgtacacttttccacacgcacctcttcgtatttgaaaatgatgacatgttggatcgacttttataataacagagagggcaatctcttttcaaagcaactttacaagatacacatcaaatgacggatcaaataccttcatttgattcttggaaatcctctcttgtatataacaatgactcagatgcaattgataactcatacttatctgttcaatcattagtttatcaaaatttaacatctattcataaacatttacattcattatctgataacactgattcaacttcaaatgatcatcttttatatatttacactcaattgagcttctttgttgattatattttagaaacttatcctaaatctaaggaaattaaatttttgtcaacaaatttaatgaatttactagctaaatcagttagttataatttattacttttaatgaaaaatggtcatgaaaaattcaatatatctttaattgatcttgttaataaattgatatctcctttattagaaaatgttaagaaactttctaatgtctaaaaattggtactcatcaattaaacacctttcaattatacttttaaaatttatcttcactaatttcaatggcttcttaaataacttgaaaaattcattggttactttactatacaaacatctctcaaaagcgaatgactcatataactcttcaattgaatcaggtaattttaaatcaaactatttctcagatataattcatttaattgatatcattttaactcatgataattcaaataatgtattagatgataaattatataatagacttatcaaattacataaatttacaactcaaaaaaatacttcatctagtggttcgactagttcagcatcttcatcttcaaaatctaacattaatttaacttcttcaacatctgcaaattctggtgcatcaaattcaaattcaagttcaagtcaatcaatcttctttctatacatatccattgatctctgtgattcattcacattctatcatcacttcaattttaaaatctgatatgcatattgcttcaataacttcgaataaaaaaactaatatgaatgctacaaagtatttatcgtcattgaaagattatattaatcaagtattctctgatatggatactgatcataaaaaattgaaactttcattaactaaaaatttatcagatttacttgtttatacgttcattgttttcggttataatatcaatgaagtagaatatgctttagaatcatgtttatccgttttattgaatgagtataaattaataaaaacttcatcaaatttaaaatcttcaattcttgaaacgattgttcaatttttatcaaaaatgaatttatactatcagacagatagaattcaaatatcaagatcttcttcatccattaattttgtttcattaaagttatttgatattttaaacattatctataccaaattatttgatttatctgtcagtttccctatcattgagaattcgaaatcaaataaaaagtcatcttcaacagattcaaattcaggtagttctattttgattgataattccatctcaatgaattttgcaattaaaactttaaatcatctatctttactacacaaattcctcatcaaagagttagataatgatgtcaataaattgattcttctttcaaagttgattttaggtaattcaaaatcagaatcaagtattaaaataaaatgcttagatgaaatcgtcaatccaaataatacagatgaagttgctaatgtttggtatgcatcgaatttattatccttttcccaattattgattgaaagtttaaatgaattcgttttatctgatcatggtagtttatcatctagtgatatcaatacagatattgcttctcagttggttcataaagttaagtctcttacattaaataaaaattttagattacgtgttattgcttgtgaaactttagtcaaattgttaaaaataaaacctgaattaagttttgaaataatgaaccaatccttaaacaatttgtccgcatctttccagaataaaacaatacaacaagaccaaaataaaaatcaacctcaagcacacacttttaatagtaactactccaactcatatttaatctcatcaatattgtctttttctcctcaagagtatattacatcagattttatacttgaaacttattctttatcattggactatttgaaaaaatttaatacatctgttgtttccacaaacttgtttggttcaacaaataatgattttttaatttccaatattgattatgaaagacaaattgtttcatggattcttttactgggtattttcaactatgtatcaaatgatgagaacatgaaatcaaactatgttttccttcaaaatgcaaatcaatttttagttctttggaaaaacttattagctcactcattaccaaatgggttcctgaaaattgatcctgcgactaaaacagtaactaacttgaatgaaattatgaagattattgaaatcaaaaaccaatcattagtttgtttaatcacatatattagctttttgaacttaaatgatagtttatctgatgaagatttaataagacaacttaatcaaattttaactaaaggttacggatttattacaacactattaaatgaacttaaatctttaaaacaaatcccagaatatttacttaattctatcagtggtggtaaattgagaatttttgaagcatatttgaaattattacctcatttaaacatcaaaaatgaaatcagttcatccatgttgattgaaattgttggaaatttctgtgatattgaaaagtttagatatcaatttaaagatccttttggtaaatatatcaaaacctccaaaaagaaagtttatattaattctatctcagaatacacaatttattatattgatgatggtttatggtatggattaactagtaaatttaataactataaagttgatgagttaatgattaaggataaatcaaagcaagctaaatcaaatcaaattgaattggacattgatttagttcctttacataatcaatttttaattgaatctccatattatcaaagtatttgttcaaatatcagtgtttttgatgatactacagaatccagaagctttaactttttaaatcattcattactacatgattcatttttgttattatacaataactcttatgatattggttatactgatactatgaaatatccagtttctacagatactatgacagttgatacctcaattgaattatttgcaatttcatttcctcatttatcatcaaaaattcaattatctgttttggaatcgattagaagttcaattttttatcaaaccagagaaagtaagtcaatcagtaataacagcaataacaaaaaggcttcatctactgatgaatctgaagagaataaaatcaagctggaattttctctcaacttaagaaaacgtgcgatatctataaattcttcaattgcaatacacagtcttttaaattacatgttaagatataattctaatcatactgttaaacttagattacaaaagatgttgctaatttgattgttgagactttgaaaaatattaattttgaagatatttatcttgtcaatttgaattcagagagtattggtatttgttgttcattagttgagaataaggatattcaagaagacgttttacataatcaagttacaattatcatgaactctattgctgaaaacacaaatccaaacacctagagcatttagtgtgaaaacattatcacaactaacaaagtattccaatatagtaaatacttccaaaatcgtcaacatgttgttaactttagtattggatccacatccagtagttcatgcagcaacgttaaacgcgttagatatttttattaatggtaaagtccaatatagaagtttcaaccgatttagctcatcaaattttaggtagtttacaaaaaatatggttaagtgatgattttggtttaagatcaagtactactattgtttccaatgtcaattttagagagcatagtaattctgtaaacttgattgccaaaatattgagatcattagttaatataacaggtccaatgattagattatgggatgatgatattaagacacagttaaaattcttgttatttaatttacaaaacttggtgacatttgattttgaaattttgatgagagaatttttgaaaatatttgaagagttattagtttatgataaatctttgattgatttaaagaattacaaattattaactaaattattaattattaacaactttaaagattggtgttagtagtcattctttaagtaatttaccatttgataatgaatatgataatgagaatacaattgaatgctttcccattgtaccacaagttttaaattattaaatatgtcattagaatctgcattccaacttatttaaagttagataacgaacagaatgatgttattgattatgattttgaaaacttattatggcttgctcttgaaagtgatcctgataatgaatcaattcaaaatattattactattttaatgcaagactcgtgtgattctagtttgaataataaagctgaatggtataataaattgattaagtatttcaacatcaataaaagtgaattaaatcgcccgctattaaagatttttgaaaagagaatcaataatggtggcatgtacttcagatcaccattgactacaacaactgctaaaataaataatgaaaagaagtccaaagctgaaaataccaaaaaggtttcatctgtggatgatccatctgttgatactaatgaagataaggaaactttaacatctgagcaaccattatctacattaaatggagaaactgtgaaaaagtataatactaataatgatggtgatgatgatgacgactgatgatgatgatgaaggtgagatattactataataggggagctacttctaataatgataaaataattcatattcttgatttatcgaatgagcaaataaattggaaattcaagctttttattctaggtttattaaatgaactattaacatattgtgattcagatattaagtttaaagtattattatctaaaaagatctcagagtttgttagaatttcatttacttcatcagtttcaaatttaatttcattaagagtttcatcattaaaattacttggtaaagttattgaattatattctgatatgaaagatccattataccctgaaatttcgattcttgatcaacaacaagcacaaattatgagtactattacaccatcatttaataaagagtccaatgttgaattatcaggtgaaggtattgttttagcttcaaagtttatcagtagtaattatcattgatgtttccaaaactgggcgtattattaaaatattaacatcatcattagaagatattgcaaataatattggtaatttatcaaatgataataatccagaaaataaggtattgatgaaagttggagatgttgacattttaactaagaaatctgaaaacaagattaagatgtatatcttacaagcatggtctaagattttaattttgaatgaagctaatcataattctaacgattccataaatgaactaattggtacatacattaaagttttgataactttatgggtttattcacttagagaattttcaatgttaaaatatgcaaagagtgaatatgttaagagttataatttaaatgaaggattaagtttagaaatttatgaaagttgttggattgattatgctgaatccatatcaattacaattgagaataaagaatattatggatatttaagtgaaattatgggtgatgatattagtaaattatttgttaatatatttggattatgtttggagtatttagttaagaaatcaaataagaatagtttaggtgaagctaaagatgatatcagaattttgaaaacattaagaagattattcaaattaccattatcagttaaaattttatttaatgattatattttcagtgaatttgttgatattattaacaaattaattattgttgcatctgatatacaagaaattgaaattttgagtaatgttgatgaattaataagtaatatcttcatagattattttgaggatttaactgttaacaataaggaggaaaaatctattgaagagatatattctgattttgacaagttatttgaattattaagattgattattaagattatcaatatgaaattaacatttattagcaaaaaggaaatattagataatgattcaaatggaataatattagatgatagttatatcttattactaaagaaatgtttttcatcattcattgaaatgattagtttattaccaaagccaattcaaattgactttatattgtaatttattatacatgttagtattagttcatgaatttaagaattcacaattaattacaattttattaccagtttatcaaaaatgtttgagtaattataaagggttaataggagaagaaaatggtgataataatcataataataaaaatttaaagaatatattcaaggatattgaaaattgattcaaaattaagggaagatcaattattagcatttataatattgaaaacagtacctgaaattaatattgattctgaagatgttgcaaaaatcaatactataattattgaaggattaaaatcacaagagaatacaattctttcattatcaattccaaactgttaaatctataattaataatatttcaaatgattcaaataacaattcctcaattatattcaagggattaattccattattaattaatttattaaataatgataatgaaggtaatattactgattccacgtataataattgagatattaatgacatttgtcaaaaaaatagttgatatgggtgaagatgaaaaaattgaaggtagttatgaattaattattccaattataatttattttaatgttaagaatggatttgatgattatgttcacgataaaatacttgaactaattgaaattaatccaattaattttaagaagataattcaaagaagtgatgatgaattaagaagtaaaattgaaaaattagttaataatggtagtaaaggtgatgaaattgtaatgagtaaagaatctcatattgaattaaagacattaggttagttttgtatagtgtatagattataaagtagtaaattttagaaaatagatacgcgtaataaaatagataacgacagagtatttgttgtgataatgataactattatgttttgttgttgatttatgggggaatattgatgttttaatgactatttgaatgtgttggtaggtatagtaactgttgatgtactttagaggtgttattgttgttaaaaaaagattgaataaaatctaacgggaagtaataaccagaatagttttgatatttttaaaataattgaaggtggtaaaattagtaaatttttaattttttaaaaaaccttaaaaaaagacactaaatacaaaggttatatataatataaaagaaatataaatgatatgattaatattttctagctaatttaatttcaattgattcaacattaccaaaataattaccaaaataggagataaaacaatttttcaaacaatttaaattttcatataatccagtgaacatttctttaccattaggatttttaattccatacatttgcattaattttctatttaattcaataactgataagtctttttgtaattcaaaccaaggattaattaaaaattcatttaagaaattttcaagattataataaaattcaaatccattaccaataattaatttctcaactaataaaatatcataagactcatctaaattttgtgaagtaattaaataatcacaatttactaattcaaatgggattggatgtgatgaagttgaattaattaaattatcgaatgaataattggagaattcattataatcaccaatattattttcatttgataaaaattttaatctttgattattattaaggaagaatgaagatgggaaaaaatctttattatcaatacaaatattttgtaaataaggtgaataattattatcagttgttgaatctgttaaatgtttgaaaattttaattgatgcagtttcattattaattaaattattaactcttgaaaggaaaagtaataaagaaattgtaattattatgaaattaattgattttttcaataatttacaaaatgataatgaacatgaagatgaaactaattgagctgctgatattgagattaaatgataaattggatacattgaagaatcaattgaaggattttgaaatgaataaaatgtaatataaataattaatggtaatttatagataaataattgatatttattaaaacctgataataaattaattaatgccaaaatgaataaaatattttgatttaataataaattttcaatatgataaatattaaaatttgataatttaaaaaatgataatgaattatatgagatataagttatttttgaataaaataatgaatcaatttgtgaaataaagaaagcaataaagaaaatacaacttaaagttgataatgaataaatcataaaagttttggatttactaaaattattctttaaaactgattttggtgaataaatcaatgaattaattaaaatatatgatgagaatggtaaaattaataaaattgcagatggataagttgaaaaagttgcaattgaaattaaaattgttgcaattgtataatatttattaattaaaggaattgaaattctgtaaaggttaagtaaaatatttgttcttgaggataaatcatcaacattttcatttttatttttattttcaattttattttcaagggataataattcatcatcaatacttttaataaatttttcagtattaaaataagcaattatataattagttgaaacgattgataataatagagcaattgaattaggtaaaattgaaacagatgcttgatacataccaggatttaataattggaaaaataaaaaccaatatttaatatttttatttaagaattttaaagttttagataatttaatttctgcaattgtgaataaaattgataaaataattctaattaaataaatgaaaacataaggttgtaaatttaaaaatttcaaagggtaactgaataatgagaatggaattaaataaacatatgaaccagatgaattaattggatcatagataattgattgtttaccaaataatctaattaagaaatttaggggttcccaataattataaatttcaattgaatcattcaagggagcataaatagctgcatgaagacgagcagttaatagagcggtgttaagaacgtaatccatttccttttagctgtttaaagggaggaactgtagattgatttgttataaacacttgttccaattgatcaatattgatataataataataataataaatttcatgttagcgacgatgcgtcgattggtgtggggaagttattattatagtattagtattagcatacgatagtatagtataagatacaagatacagtgaatagatacaatcactacaatggaatagaacatttgtattgaataataaataactataagtgtataaaagaataaaagttagacataagacataagacataagattaattatatctatcctttgaatttgcattccagaagagaccatctttatcaatttgtttaccaacaagaacagtatttggaggatgaaattcatttttatcactataagtatgtttaacttcccaccaaggtacatctttcataatttcagcttctctattataataagctaatgatcttcttaaaatatccctatcttgttcagcttgtaaaagtggtaataaattaattctagcttgaagtttttccctagaaatttcttgttgttctctattaccttgaataattttataaaatccgtaggatgacattgtaattaacataccaagccaaatagttggtctaaaacctcttgaaggaatatttctcttccattggatcttttcataaccctgaacaggtggtaagtcttgatgatgtgccattggatatgtgaagtgtattagtattataaataataagataccatccaatagtaataatataccttataccaatgaaaatttaaaatcaactttccctcactaaataaaatgtaaaataatttactttattatggtgtacgagtgtctgataggcattgtatattccgatgtcttattatcagatgattatcttaatgactttacaagacactctcttttattggcaatgacagttaaattaacaactaaggaacaaatcaattcattattagacaaatacgatactttcctatttgattgtgatggtgtggtttggattggtaatgaattattaccttccgtcaaggaaacaatggaattattacaacaacataataaaaaattaatatttgttagtaataatagtacaaaatctcgtaatgattatattcataaattaaataattttggtattttcaatattaatgttgatcaaattgttaattctgcttattcaactgcaacttatattgaaaaagttttaaaattatctaaaactgatggtaaaaaaatttgggttttaggtcaaagtggtattactgatgaattaaataataaaggttatcaaacaatgacatttgatgatttaacgaaaaaattccctcatgatgaattaacaatggataatattgataatttaatttttaaagatgaaattaattgtgttgttgttggattagattttaatacaaattatttaaaagttggtattacaatgcaatatttattagataataatatcccatttattgcaactaatattgattcaactttcccatttaaaaatactaaattacccggtgctggttcaattgttgaaattgttaaatttgcttcaaatagagaaccaaatgcaatttgtggtaaaccaaataatggtatgatggattcaattttaattagtaataatttacaaaaggataaaactttaatgattggtgatagaattaatactgatatgaaatttggttttaataatcaaattgatactttattagtactaacaggtattgaaactgaagaaagagctttaaatgaaaaaattattacttattatactaataaacttggtgatatttatgatttatcaaaataataattatatagattatttattaaatatagattattaaattattaaattataatatattatacatccgagcttatattattatttaaatatattgaaacgtttattgcaattacaattaaactttatctaattactatactattgaagatgtctaattgtgcaaaattcccaaagatattaatgattcaatttcaatatattaatacatttatcagaatttggtaactagatgggagaaatcaataggttattaggtggtgtcaaattgtctaagcaaattgctaatcatgttgaggcaaaaattaaaactaatcgtaacagtgttcatgttgttgctagaattctagaaaaattaaagattccggtcaatgataccatgatgcatttcaagttaaatgaaatcaatgctaacgattattgatatcgttagaatcaaacaaactattgaattcattctcgttggtttagaaatatctcaaaccccattcaatgaaaaagtcggttgtgaaatcattattaattcaggcaagcttccacaatattttattaccacatggagaacatcaaaggaagattataacctatctcaactttaccattcaattgaacaatcgattgttgatattaaccgagttgagaaaacaaaaggtatgaaacaaataaataatatcactcaccataaggaaaatcatggaaattatgttagatctaagtagtgtagatattgtagactttaatcccacaatacaagagattgcagaaaactaaaggctaaaaatgaagcctagtgatcaagtgtatagtactattaagtactaataccacttgatggtaaaagaagaagaagaagaagaagagtgaaaagaaagagtgaaaattttaattttaataatgatgtaatgacataatataataaatttcgctcttataaaagtaaaagttggtattgatggatgtgtttcgtatatatagtagttctttataatagtatagtatagtatagtatagtataagtataagtataatgtcagtaacacaggaaacattagagactagtgaattaattaattggacaatttttcaagaattattattaatggatgaagatgaagaaggatttgcattaagtttagttgaaacatttgtacaacaagcaaatgaaacatttattaaaattgaagaattaataaattctaataatacaaatgatgaaactttggagaaattatcacaattaggacattatttaaagggatcagctgcagcattaggattaaggaaagttcaagaacaatgtgaaagaattcaaaattatggtaaaaaggattcatttgataataatgaaattgccaataatgcaagggataataatgattggattaaatgtgttaatgaagcatatagggaaactagaattaattttgataaaagtaaattattactgtcacaatatttccaatcagaattataatcatggaaaggggagttaggtataatgtatgtatgtatgtatgtattttaatttaataatatataattataaaataatataaaatagtattatagtattattaattattattcttctctttaatattattctctataaaggaataaaccaatataagagagaaagataatataccaaaatatatacagatagtatttaattgattatctgatatcattgattgatgtaaagatagttgtataataagtgatatttatatcaagagataataccttattccaatacaaacaagtaacgtgtactcattaataataaatttaataaatatacagtcccatcgacgtaaattattacgtaatataataatcatacacggagtaccggagtatttaaaattaccacattattttaatttgttaatttttaacttaatatggtaattttaaccattaaatagctttccaatttaattactgtcttttctttctcttgctttctcttctttcttttactttctcttacttttctcttacttctctttacaacaacacactctctcaatatgtctagaaaattaactttcattccaggtccaattgaattctctgataatgtccttaatgcaatgtcaaccccttctcaagctcatacttctcctgaatttattaaagttttccagtctgctttaattaaaactaggaaaatgtttgattcttcaccagattctcaatctcaacctttcattttatctggttcaggtactttaggttgggatttatgtggtgctaattttatctcttctccaaatgataatatccttgttttatcaactggtttcttctcagattctttcgctaattgtcttaaaatttattcaaataatgttgatataattgaacctgaaaattttggagattcaactaatttatctactcttgaaaataaattatcggaaaaatcttatcatttaattacaattactcaaactgatacttcctctggtgttttacaaaatattgaagaaatttcaaaaattattaagaaaatccaaccaaatgctcttatagttgttgatgctgtctgtgcaactgcttgtgaaactttaaaattcgattcttggggcattgattatgttttaactgcttctcaaaaagctgtcggtgtacctgctggtttatcaatttcaattgcttctaaaagagcaattgatattgcaattaataaatcaaaacctcatgctttctttactgatattaaaagatggttaccaattatgaaagcttatgaatctggtaatggtgcttattttgcaactcctgcagttcaattagttcatgctcttaatgtttcattagatgaattattatcaattaatgatggtacaattgatgaaagaattcatttacataaattagcttctgatgaatttaaaaataaattaattaatcaattaggtttaaaattagttccaaattctttagatattgcagctcatggtttatcagttatttattatcctaataatattaaaggttctgatttattatccaaaatggcagaaaatggcttcactatcgcttcaggtatttataaagattataaagataaatattttagaattggtcatatgggtgtatcagcaattggtgaaagaaaggatgaattaaatcaatgttttgaagctcttaaattatcattatctcaattaggttatgaaaattaatatcgtaaagtaatattatatagattataaaataaatacacactaattcattatcattaacatttcatttttattatttgaatttaattgtggaaaattattcctctctaaaaatgtacttaattcacctaatgtaaaatcaggatataaatttaaaaaattttctaattttgattgaaatttttcagaaagtaaagtaaatttatttaaacctttaaataataaaattaataaaaatgttgtcctatatggatttttacattttggtaaacatttttcaactgatatttgtaaatgttcaatatatgttaaataagttaaaaatcctttctttaaatcaataaattcttcagatcctttaatttcaattattttatcaattaataatttaatcatatttgatttattttgtaaattaattataatttccaaagttttaaatgttgttaattcattcgattgacatttataataaatttcatcattaatatcacaataatctaatatccattcctttaaattttgatccattctatcataaaataatgtataatctttaatattaagataattattaccttgaaaaattatccatgaatttttcaacattttcattaattttcctatcaaatttaattaaatttgttaaataatcatatttagaattttcaattaattttataatttcatccctaattgattcaaatggtaaatattcataaaatttaatattaaattcataatctaattcctctgatgtcatctctaatggttctaaaaattctttatatccaatacttatttcattttcttcaattctagtacaattattatcaatatatttaatacaatcttttaaataattaatatcatttggtacattattaaattcccaatatcctccttgtttaggtctagtatatttaactctcattaaaagtatatctttaagtaaatttaaatcatttggtaaatcatcatttgtaggatggtggtggtaattgtgttataattgtattattgtttataattgtttgattttcattaatatcaagcatttgtaattgtgaattaagactattagtgaatggatccatgattgtttgtctttatatttgtaacatttattccattgaataacgatcagatgaatcaattatttatgctagaactcgattattattttttttttacgtaagttataggaaaaatcataaacagcgttgaaaccggattatacagggtaagatataaaatataagatataaaatgttaatgttaatgtaattgtaaatttaaagagcaatataataataaatgaataaaacacattgttgaaatgtaatattaatttatcaactttaagttgataatgggaaagcaccagcccaattagaaatttcattctttaaattatctaattcaggtgaaccatcagcaatttttttcttaaaatcttttaatttatttgcttcaattggtaattcagattgaattttctttgcatatttaacacttgaatcaatataattaacaattttaacaaaatcttcttcacttaaacctctagttgtcattgcaggtgcaccaattctaacaccacctggaactaaagcagatttatcaccaggaattgaatttttatttaatgcaatattaattttttcacaaactgcttcaactctagcaccatcaatacctttatcctttaatgaaactaaaaccatatgagaatctgtaccatttgaaactaatgaataacctaattttttaaattcattttctaaaacttttgcattctttaaaacttgttcttgatattctctaaattcaggtgttgcagcttgctttaaagcagttgctaaagctgaaattgtatgattatgtggaccaccttgatgacctgggaaaactgaaaaattaattggattttctaaatcataataaatttctttaccagtttttggattaattgatctaacaccttttctaaagaaaatcattgcacctcttggacctcttaaagatttatgagttgtagttgtaacaatatcagcatattcaaaaggtgatggaatcacacctgcagcaattaaacctgaaatatgtgccatatcaacaactaaataagcaccaactttatcagcaatttctctcattcttttataatcaattaatctacaataagctgaagtacctgcaactaaagttttaggtctaaataaaattgcagttttttctaacatatcataatcaattaaaccagtatttaaatcaactctataaggcattgtttcaaaataagttgaaactgctgaaatttttcttgtatcagtttgataaccatgagataaatgaccaccatgaggtaaatcaagacccattaatctatcatgaggtttcataattgcttgataaacttctaaattagcaggagaaccagataatgattgaacattaacaccccatttctcaggatctaaatggaaagcttttaaagctcttgcttgacataataattcaattctatcaatatgttcattaccaccataatatcttgcacctggataaccttcagaatatttattacacattggagttcctaaagcatcgaaaactgcagttgaagtaaaattttcacttgcaattaaatcaattgaatgtttttgtctatcaatttcatcttcaataatttgtgcaacttcaggatcagtttcttttaaatgacctgaaaccattgctctatgagcaggagataaagcatcgtgtgacataatttgtattattagagttttgttaataaagtaagtaataatcttctaaaagagaataagatagtaaactaaataatataactttcaaaaagcaagaataatcaatcaatttataaataaaattaaaatgattcccctgttacggggtgttgaaaaaataattaaataattaaattaatatgacacattgtctattgtttaattattataagagagaagtcaaattttattttttattttttcttagggtctttgcacgtgactttgggtcgatggtcgatgacgggtttgcatgtcttttattagtagggtagttcattataccttacatgatcatttaattataagattttttattaacaaattattataaagataatatagttatatggattatagatttattgttagattaatttaaatacatacatacatataatgtaatgtaaaaataacttaacgataagatttttggaatcttgctcttgcaccacgaccaccgaatttctttggttccattcttcttgcatcagcaactaataaagttctatcataagaagcgaaaactttctttaattcattctttgaagattcatcaacatattttgcagtataagcaattaaaccttttgcaattgcttgtctaattgcataaacttgtgaaacgtgaccaccaccagtaactttgaattctaatatctaaacctgcaaatttatctaaaccaactaataataatggttcataaactttatgtcttaaaatttctggttcaacaagtgtaattggacaaccattaactttaattaaacctttaccttgtttaacatgagcaacagcagttgcatttttcttcttaccaaatgtttggacagatgggatcttagcgacgacagcagacatgacctgataaatgaagtattaatcaagagagaatatataaaataatgaataatattaaagtagtattgaaattaaattgaaaaattatcatagaaaatcaataagacaaaatgataatatagaggtaatacctatatcctcttactatactataatcattactacaatactttccctctctcactgtataaatttttcatttcctcactctcaattaaattaaaatttttgaaatttttgaaattttttctctctttatcacagtcacagtgtcccaaaagagtaatctgcgcgacgcactgcactttattgtctcaaaagggtaacaccccctcgcaccctctacccgcacttttgaaaatttaattttacccatcatttgtcgggaaacttcacatttacccactaatgctaccctccatcccccgctcagtggtgaaatttttttttttcttcattccagtttctcaatattcattattttctatgtattgtatgatgatattactgattattcttgtagattttctttaattttttctaacgtttaattacctttttcttgttattattctattagcaacaactccttaacaatgggtacgtatactacttatcatcttaaatcaatatattaatatattattaaaccataatgaacaaatatactaacataataataatgaacattcaattaatttttaatttaatatagctattcacaagaaccttccaattcttaagaaccacttcagaaaacactggcaagaaagagttagagttcatcttgatcaagcaggtaaaaaagcttcaagaagatctacaagagctgcaaaatctgctaaagttgcaccaaaaccagttgatttattaagaccaattgttagatgtccaactattaaatataacagaaaagttagagctggtaaaggtttcactccaactgaattaaaggctgttggttatactccaaaatatgcaagaactattggtattgcagttgatttaagaagatcaaataaatctgttgaagctttccaaattaatgttgaaagattaaataaatataaagattctcttattatctttgataaaactactaaaccagcaggtgaagaacaagtttcaattgaagcaactttccctgttgaacaaattgcttctgatgttactccaagagctgttgttgttccagaagaatctgcttacagaactttaagattagcaagatctgaaaagagatataaaggtattagagcaaagagagctgctgaaagagcagaagctgaagctgataaaaagaaataagtttagttaatttataatagctttatttaaaatataaaaattatcctaatacattttctatagtaatataaattaaaaatcttttgatataattcaagtactaacatgtataatacatttgaaagcatttaactatcatttcattatattacatctacgatctacatccaaatctacatctacataatatttttgtagcaaattattttatcaattaatcaattaaaaaattttatattctatttataaaaatacataaattcaagttatttaatcgaataaaccgaaacccatatcatcatcggattcttcctttgcttcttcaacttcttcttcagctgcttcttcagatgaacctgctgctgcacctgatgatgcacctgcagctgctggaccagcagaaacgttaaaattaactaataatgattgtaaatctttaccttctaaagcttttgcaaaaattgatgcccaaattgattcaaattcaatatttgcaccttgagttaatttaattaaattttcagtagtgatttcaatatcagaatctgctaagataactgatgcgtaagctaatgcggtttcagtagacatattttgtttaatttaatgtggaataatcactctttaagcaaataaaaattgcagactagttccttaatttcaatgaaaaggtaaaagatagataaaaatataaaaataaattaatgttaagaaatattcaatagtaagtaatttttcaatttcctcaaccttttttccaaaatggaatttctattatgtggaaaattatataataagagtgagggtttcccaatgcggtaattagggcttagtggtcacgtgttaaaagatttgaaaggggctcgtcaaaatcctacttactactacatatttatcacgctaaaaaccgcgatttttttttatttcctgaataacatctttgggactttccgcactaacaaatgtagctctttttcttatctgacctctagttatcgagttatagccctttaaagttgattttttcgatttttcaaacgttcatatctttttctttatgggtcattaaaacacgctcaataggtcattagatttggaattgtctgaagtttacttagtaatttaattgggatcaatagaactttcctccgtccttgagagacatttttagttttttgactttttgtccatttttgaccactttcaactgactctggctccttcaaatacccctggaggtacacttttgaaacatcctgtgtgtagctcgtatcaatctctttcaagcaaaactactattagtttttcacaatttggtaaagtactttaagtatccagttttcagtaaattttggacgttttttttagaaatttttcaagctagcttttttgttactttttgttaacaacttttaatgttcaaaaactcattttgtagatgtgtttttaaattattaactgatgtaaattatgggtgaaaccggctttttaaaaaaatgttatgatttaatgtgttcaaattttgctcttttttttcagcaaaaaatattaaaatagagataacttttttttgaggcaaaattggagatgagatatttgatattttgcagaaaaactgtttctctttcgtttggtactattcacgcccgatttaaaagagattgaaaagtgtagtacattaaattaacgctgattttaacgcttttcaaatagttatagtgatagttgattacgtaaacgcgtatctaaaattcatgtacccattttttcatgttacaaatttattacccagtgtctacagaattaatggattctttacggtttacatacttaaaggtttactattgtagtgacatttgttattattagcttgttatcaaaaataaaatatgtagtagtaagtaggggtcaaaatttcccgtagggaaattgaaattaccaaacccaacgctttaagcgtcagtttccccttcaggggaaatgacaaaagagtcgattaggttcgtcacgcggaaactagttattatctatttaaagattaacatcgattaattgctagttctagtttaattttaacaagttataaataaataaagaaagaaacaattataaataaagaaacaattataaataaataatacaataaatgatctagatcaactagtttattgcaataaatgcaccaattgctgcaattgcaggaacaataacaccattaacatttaatgatgaacctgaacctgaatattcagtactaacagttggttcagctgatttagtttcactagttgaatattcaacaacagttgttgaagatttagtagtacttgaaactggtttactattatcattttctctttcactattagaagtaatagaaacagatgatgttgatgatgctggtttagtaagttgtgaactgatgaatgattcagtagtacatggttcagtaactgtaatggtaataccatcagtgacagtggtatacgtagtgtatgaagttgttgatttggtagttgagacagatgatgatatggtagtacatgattcagtaactgtaatggtaacaccatcagtaactgtagtataagtagtatatgaggttggcttttcagtacatttttcacatgattcagttgcagttgttgtattcttttcagtgatagttgaagttgcagataaattactcttacctctgttatcagcatcaatacttgaatcagatgaagttgaaacaattgatgatgatggagcttctgagggtgaagcaactaatgatgatgatgatggatgatgatacagctgcttgatgatgaatgatgatgatgatacagctcttgatgatgatgatgatgatgatgatacagctcttgatgatgatgatgatgatgatgatgatgatgatgatgatgatgatgaaatatcacaagtttcaccgtgtggtaagtttggtaacttgatatgatacatcatatattgagtatcaacatcaaccccttgatcatatttaattttaccaaaattcaaataaccatcagttgtcttgtaatcattgtcagaacctaataaaaggaaatattcatcatttgtacatttaactgggaaaagatccatactttcccatttttcattaattaatgaaggatcaactgcaccaccattatgaagaccaaatttagataattcagttggatcaattaaattaataaatgaataataagttgcaggtttaatacttgaatttaagacaccctttttagttgaaattttttcaccaacaccgtcatattgaccaacaatattatcagcatcagttaatgaccagaaatcaacgtgtttaaagattgattcagtaccatcttcaccaccattacctaaatgagaatctcttggtaataacataattaaattttcattaataactctcatttcactttgtgatgcagtctttgttttaccatcagctgcagtataagttggtaaaacaacaacatattcaccaactaattgaggtggacaaacagtaatatcatattttaataatctatcattaaatctactctttgatttttctccaccgtcttgaactgttgcagattgtaaaattgtaaataaatatttaccgtcaggtgtaatatccataccttcataacctttatttccagttctaccatcttcatttggtgtgacagaatatgatggatcagtccataaagtattatcagatgaaaaaaataattcaccattaacatgaggtaataaagcatcaggtgccataatataatcaagcatattaccatttgaatcaaatttaaataatgaaggaccatattcatcactaatccaaaaaccatttttaattgaaccattaattaaagtaattgcttcagcatctaaagaaattttagttgaaaaagtttcattaccttttggaattgtccaaccatcaccttgatatttaacagctggcatttttaaaccattataatcaattgttgtatttgaatctaaacctgtaaaatattctccattaacatcttttaataaaattgtatctttataatcaagtttaatattttcagatgaagaggaattttttggagtgaaaataacatcaaattcatgaattctactaaaagtattaacagtacctttaacattccaacctctatcaggtaaaccatacattgtaaaatgataatcaccatttgaatcaatatataaagttgattgatcaacttgtaaacctgaacctggtgacattgtttcaccatatttatcaacagcatttgatgcaagtttaccaaaacccaccataccaaaagattctaaagttgtaccttcaatatcaacactgacataagccattgctcttgataagagtgctaaaaaaacaattttaattaatgagttcattgtttaaaaaaaatgattgactctagttagtaaataaaaattatcttgcttaatgagatattaaattaaaattatttttattatcattaaattggaactaacccctggtatttatattcaaatgcattcaaaacaaaacaaaataaaaacaaaatagaatagcgaataaacgtttataccaattagtccttccccaacaataacattaaacggtaatcgttctttcacgtgggagaccttaacactgcgttctctctttgtttatgttatattacttacattatattggtgccctacttttatttctatatattatcactattccaattaggaaaatgcaattttacagtataataatacaacttcaacttcctagataatacacgtggttatcagttttaagtttagtaccgtaccttaatcgtttcggagttctcactgacatattactatgctgagccaccaaaaccgtttttttttcaattctattttctattttaatctatatttgcacacattttatttatttatttacttatttatttatttatttatctatgtaacttttattgggaacttaaagacactgtattttttacccttctttatagacacttgaaaatgaaccatataatacctattgaataaacaactttcaaatgttggtatcaaacataatgagctcttatccctctgtttaacactcattgctaacggtattttgacctttgcaacatatttccccctatcttcatcatacatccatttattacttaaattaatagtttcttccagaaatttaaatttagggacatataattcctttactgataatttactcattgcattaacagaattataaatatttctattaacttgtgtttctttaattaatcgttttaattcattcaaatatgctgtgaattgtctacgaatacttggaatagtatattgtatcaactgttcatccattaaaaattctccatcaaaattgattggtaatgcataattagaaaatacgttaatagtctttaatttagatgttatattaacacttgttggtaattcagccttatttttattacctgccttacatggttctgttgaaaattcaaattcaacaaaacaatgttcttgattaacattcctcaaactaagtaacgatgtaactgtacttaaactatctggactatctgagccaatagatgatattggaacacttttatttcttccattttctattgtattacttataaatgaggtaagtccattagaccttgatttctgtggatttaatgaattagatctacccttatcatcattattctgttcgtttttgctgtgttttttcttttgtttggatttcaatgcaaatgatctaatggattttatactactatccctagacattgatgctttaataacaatctcaccgcctgatcttccaaaaaaatctttattcatttcaatattatcataatgtaaaaatgattcaccatcactcctaataatctctggatggaaattagttgagctaccattcaattgtttgtatttttttgtctcgtctgcttctagtgatgcaactatttcatcttgttctcttctatcaagaattccaccttcttgtaattgtctcttagttttcaattcatcaatatattgagaaacaagtttttcaaatttaattatctgttcatatgttctaatattagtctttatctctctatctacaatttgattttcagcaaaatgttcattttcactacttaaattgactctaaaataaaatttctctatatcaaacataacatacttattgttgatactttttggtattttcctaccaaatttttcagcaatatccttatatccaatcatttcaactttaataaaatatgatattgattgctcctttaatgcaaaatcatcaactataatgggacttccataaaccccatcgcatcttttatatcctaatattggatcaatttcaagatcttgttcagtatcaccaattgctgatgcatcatatccatatgatggtaacatatgtaaatgctctggtatttgatccggacaattggtatctaataatgagtatggtaatttgaatgaaaaaaactttttatgaatagtctctggttcaatacatctattttctgtaaatccaataactgtattatcattaaaatctttttgtgaaatacccttaattccatgtacttttgccaatatatgacccgtatggaaacaagcatttaaatcataagttttcaaaaaacttttacttataatttttctatcttcagttgttgatccacttgcaggtgttctcatttcaccttcaagtgaaactaacagaatttcaaatggtaatggttcattgatattagatttgattgtaacataccccgttattaaatcacctggtttatattctgttaataaactttctctttcaaatgatttaccaatcattggtaattgtttagttaacgttattttaatatcaataggtatatcaactttaattaaattatttgtattattaagtaataatgatttaggattccttatcggatctatatcaatattttcactgggaattaataactctattagatcttaatgttgctaattcagattcataatcaggtaaatccgttgaatttaaatcatcatgtaatggtctattaaacatataattatgcatttgaaatgatggtaaaatatcctccagtaatgaacttcttgcttctgaatacattgatctatcatcattcgttattattctactcatctgactttgaggtatttgatgatgtttattagtattattatcaactgacatgatgcttattttctgtatatcggcttatccccgttattccctgtgggagttatattatcctttttataacaattgaaaaaaaaaatacaagaatggcacaaaccggaaaaaatatatagtatgatgttgttaatgtacagatattttattgtttatagaatgtaatatacagagagatgaaaaagtattgatggtttgatgttgtaaaactgtatttatctgaaaaatttccaattgttcaactgattacaaccactcaaaatttccttttcgggtaattttcagagcgcggttatcccggttgattcttaaatagtctaagcctatatccagccttatacaacagacaatgggaaacacatgttaaccctttgctttgattttttgacacttacctcaatatcaacagcatatagtctacttaaatgacattgttgaaatgttggaactaaacacattgctgataatttatcaatattttttaaatcaaaatgtaatggaatttggaaatcacattcataaatatttgaatttgaattaaatttccattggttgtgcaaatcaattgtttgagtttcaaaaacttttttgattatttgttcagttgtatataatcttgaaagtccattaactttattataaatacttctagctaatccagcctctaattcttttaaaacttcaactaattgatgataataaaatgagaattttttcctcatattagataaattaaaattatctaaacctccattgaatataaatttattatcaaatgtaataggtattgggtatggtgattgaatattaaaaattttcaaatttggtgaaattgtaattaaatttggtaaattaacttttgatgaatttctctttgatgaaatagaatttggtggtttaaattctaaatgaatataaatattttcattatgaatattttgttcggtatatgattcaagtgatttatctgatgatacaggttttaaatttaatgaattcagtgatgtaaatgattcattatttgatcttaactgtgatgtaactggtgttaaagttgaatttgaatgtaaatttgataaacttgtatttgaaaaggatgtatttaaattagctaaagaagttgctgatgctgaattcgaagatactggtgatacagttaatgatgataatgatgatgttcttttccttgaagtgaattgttttggtttgagggatttgatttgtgcatttttgtgcatacttaaactaattgataaatcaccttcaactttattgaagaaatcttttacaaatgaaatgttctttaatctagtaaaacctgtatcatcagttattgaagttttagtatcagttaaagttggagttaattcagatgaattaagtggagttgattttttagatgatggcaaacttgagaaaataatttcatcttgttttcttggatcttcaatacctatgtgttttaaatttgtacgttccaatatttcatttaacttatctgtaaccattttctctataatttgaatttgttttgcagttgaaacttcaccatgaggattatcaattaattgttcgtcaaaacaatttgaagtttcaattctaaagaaataatcaactgattttaaaatgataaaatcaaaattatgtttcgtttcatgtgtatagaattttttataaaaatccaaatttctaccgataaattgacatttaattgaataagaaattgcttgaccttcatttgcaaaatccatacttctaattggagatccatatctatctaatctaccataacctaataatggattaactttaattgatttcccataaccattaaaagcagttctatcaacaccaaatgaaggaggtaattttaaatgatttggtaattgatcaaaacaagaagtatcaagtaaataatttggtaatttaaaagcaaacatttttttatgaactatatttggcatgattgttctatcattaccaaacccaatttgagtattatcaacatcatcttgtgttttatcgaatgaaacaccttgtaaatcaatacaaccataatgaaaacaatgcacttaaatcataagttttcaagaatttttttttaataatttcatcaggatttgttggatgaggaactaataattccccttctaatgataataattgcatttcaaatggaattggttcatttgatttattttgaatcagtacataaccacaaactatatcaccaggtctatattgtctaaggggattttctctctccgatttaacatttaatttaggtatattcttagttaaaaccacttgaatatggattggtaattcaattctttgaaatttttcaagattatttaataataaaaggtttggatttttagttggatcaacaaaattatttggatcagttgttaaaggtggtggtgggcctaagagatcatcatcatcatcattattgttattactattattattattattattattaatggcaacttcttcttctacttctccatttaaagtatgagtatgagtataagtatgacaaattgtttgcatatcagaatcaagatctgcatggagtggaggattagcaaattgatttgtaattggaattacttttggtcctttattatctaaagttattccatcatatgttggaggttgagataataaagcaatattttctgtatcataaatagtacgattaaacatataattatgcatttcaaatgatggtaaaacatcctctaatactgaactttcatcatcattatcaatagtgttattattattatcaatttcggaagtgtaaattattatttctattaatagtactatcatgagacccataagaatttaattttggattgatcttcaaaggcacttcagacaatggattccccttcattgtgaatgatgatggttaataaagagggagtaatgaagcagatcataatgtaaatagtgcatccaatacaaccgtaattaaacttaccacactgaaaaaacattggtgaaaataattttgacagcctttcactgagagggagtcatttttttattactatgtttacgtaaggtgtactatatataacggttatatccacggttgttagaggttatatatattatgattggttattggttaaatgatcttaatgattttaatgatatattaatataataaatgcactgcattattaattaagttttataaaatatactaaatattaaataatgatataaatctaaagttggttgaaagctttaagaccacaatagaagaatctaccataagcatcttcaccttctgccttgaaagtaattgtacaacctttttaagatagattgtatcacctttctttggatgaataggtggtaccagtttcatcaatcataatcatatcacccttagtttcaagacaaatcttcatttcatcagtatggataagtataaactaatggttcacctggaacaactttgaaaaaacctgatgtaagtgtatgttcagcatcagtattctttgttgtcataatatcaccaagataagaattttctgaaatttttggtggaagcacatcgaatgctttttcagttggtaagaattccattggcatttttattagttgattatttatatgagtttttgttgctactttaaaaaagataataattataataatatttaaaagtaagatacaataaattgaaaattatagggaagattctattatttatagacaacttttatatttaataacacatatccaatgtaaatcctagcaatggcccaaataagatataagatccagtaccctgtaatcaaattaatcattattgataattttttgaatttaaacgttatctctcgcattgattatcctaaaagggtaataacgcgcttatctaagggtttcgttaaatttgattgagccctcttttcccataatgggaacttcatcttcttttggtatcattatccttcgatgtagattataatagatattggagagatgctgaaatacttgattaatttactatttaaacctataagcatccttttattttaaattgaattgtaattactttattcaactaactttattaatttatcttattttaaaacaaaaagaaaactttctttaacacacacataccttaatcacatacaatgccattatatttcaaaccaggatctgatagttatttttctaaccaaccacctgcaattccttcaccgggtaaaaattcatggttaggtgactaatcttcattctgatgctccaaaggataaaatactttcatcaggtttctataaacaaggttcaggtgaagctttagtttatgcttatgattatgaagaaatgaaagtttgtgttgaagttcatggtaaattcactgtaagtgatgaaactggtaattctgttgaagtaactcctggttcaactttctatttcccaaaaggttgtacaattactttcaaagttgaaggtactgatgaagtcccagaggaagaagcttatgcacttaactggttctgtggtttaagacctgcagattctgcataattttcttaaattttaataaatttgatatttattttagaatcagtgttttttaaacatcttataaatctataattattatataatttttatattctttgtctagtacaattgaataactgaatattataaaagaaagttgtaattaaattaataacaaaaatttaacaataagaatttcctaattagggcgtaatgaaaatttaaaaaattcaaattttacttacttaaggaaagtcaattttgagtgtcaccttgtaattttttattgaaatagaataaatactggtatagatactgtacatcagggaaatgcactatatataggatacttttaacaataataatacaataatacaatctagatactaaataatgactaaaatagaagaaaatctcataagagatgataatgataataatactattacaatagatgatgatcaaacagagcatgatatgaatatgaatattaatatcagtaaaactaataactacaatgataaaacaataaatggagtattatcattatctcatattgcaagattaaaatgtattaattgtgcacacttaattgatgatattggtactgcaccttatcatttaatcgaaccaatattaatgaaaaaaactgcaaaatctttaaaacaaatggaaattaaatcaccacaaattatacctgaatctgaaaaactatgggaaactttacttaaaagagatttccctgatagaccattaatacaattttcgaatttaaataatggtgaaaggaattaaaatgttatcaagaaatatttatgataaatatttaaatgaacgtgaaattcaaaggaaaaatgctgttggtaatttaaaacaattaaatcaaaaattaatggcactaaagaataaaaataaagttattgcaattaataaaccattgccttcaacaaaaccaaaatttatatctaaaaatcttaaaaatcaacaatcaaatacaaaagttttcaaaagtagcttattacaaaaggcaagagaagttaacaaacaaagagtacgaaattatacacaagttaataataacaatatattgagatcaatggatagacctccaataatacgaaatagtttgaatcctacaataaattcgtctcattttgctaataatagaatagtgaataataataccaacaacaaaaacaacgggaataataataataataataatgggttaattaaaataagtggttcaaataaagctaaggttaatagtattaatacgattaaaagaaacccaaatggaagtataaataatgataaaccaaagagaaaaatggatagtgatataatacgagataaactgaagaaatctaagaattcaatttacattcacaattttaataaataatatacagtttggtattaaataaatgaatacattatacaactttattctttttcaatattttatctaatgcattatcatttatatcatttttacgttttttataagtattaatattttgctttatattattaattttattatttttacttgaatcccaatttttatcctctaatgaattatctaataatccattatcaccacttattgaaattgtttgtttataagatttaattcttaatctaccatttaataaaacttttaaactccaatctttaaacattaaattacatctatttgaatcaatacccatcatttttaaaattggtataacattaattgaatttcttaataaatttgaattattaaatgaacaaccacttgaacaaattaatccacgatttctacttgctctaataatttgttttgaatttgaaattgattgagctctatttctattatttaaaaaatctgtatatttaatttcaaataaaatacctttatcaattgctgaacataaagttttatgtttcataaaacatggtaatctatcttgtaaattaaatgagattaaatcaatctctaagttggaaattgcactttgaaatgatttttcagttaatggttcaactgcaacaatatcgaaaatttgttgaaattttgcaaaattttgacattgacttggatcatcaattttgattgtaattcttgtgaagattttaattttaccactaaattcactaaaatctttttctaaattaattggattaattaaatttaaatcatttgaaattttattcttatttgaattacttgttgttgttgatggtttaaaatttaatgcaatatgtgtataacctaaaattattgatgtattaatacattttttaacttcaataagttgatcattatttatagtttcattgaaatcagaaagtggaaaaccaatatttaaatcacaaagcatttaatttatacttcacttgatgactaatcagttaaaagaacattctagcaatattattaaagattgaagtaggtaaatttatagtgaaattttttttgaaaatcatgaaatcgatttcgcttagtataaatttaaattcttggaggcttaacattttaatagatttcagtggcaaaatcttcttttctttattcctttattctttattcttcaaagacttatgagtgcaaaagttgagagaaagaatagtgataagagtgaaagagatagagatagagatgaaggtatgctagatattggaaaacattgtacaatatgtagagaattagattttttaccatttgtttgtttgaaatgtcaaaaatctttttgttcaaatcataggaatgaatataatttacatccatgtatgattaaattacaacaagaaaaattagataaacaagaaagggagaaagctgatatttcaaaattacctaaatcacagagtgttttccctgatttaaataaaatccggaaagaagcagagattaagtatcaagctgaacaaaataggaaaatcggtcaaagattaacaaatattaaagatgataataataaattattaacaagtgttgaagttgcaatgttaaggttaaaaaagttgttgggtaatactaaatcaaataacaactctaaatcaagttctggaatgaaattattttcatttggtaataataaaagcactaattcaacagcatcaagaatgattgaattaaataaattgaaaagaagtgcaaagggtgattcacgtataccaattaatgatagaatttatgtatggattaattataattctgatgatgatacaaaatttgaattgaagcaagggcaatttttctccaaaagatggccaattggtaaaatgttagatagtagtgctgaattatcaaagataaagaatgttaataataaagaagttgataaatcattaaaactggcaatgttcagaaggaaaagagatgataatagtaaaaataataataataataacgaagaagaatttatttatataccaacaaatggacgtgtagagaaagagattaaggatggtgatgaaatttacattctacgtggacacagataataggttttttttatagaatttgtattattaaataaaagtactatgtaataaataagaaacagttttgaaaaagtgtcaaatcatggaaaatcgcatttactaggggtacattggaatattaaaaatagcataattgtatgattattgattaaattctggaatctttcaagtctatgataatctagtatctttatataagcataccactcctctacagagatactagaccatgtaaattgcctataaataggataaaataaggtgtaaaacaggaatagctccacaacatagacaatgtcatagtcatagcgctaacgcattgttactacaattagtaactgttaaagccgttgataaggcttagaaaagtggtattgttaaggtctagaatggataggtatatagtaagtacatgatatacgttatgaggagcataaaacaatgcctaaggggtacaagatctatgtagtataaccgttggggtacatgagttttttgtgttttcgttaaatataagtaagttataaaagtaaatggtatatagtgataaaatctatataatatgcaagaaatgaaagtttagttagttaattaatctttttaggaaagcttttttttgtattatgtatgtatgtataagataattgaataaatgcaaatattctagtaatacaggttttctattatttatttaatgaatagaaagccatttttcgtaatttttttctgatgatgaatgcaaaatgttagaaatattagtaatagttgtattagtattttttgaatcattagtagtaggacttggggttgttgtttttgttgttgttgttgtattagtagtagtagtagtaacagctgctgctgtaataggattattattttttgtatgatgagcaatacttaaacttgcacttctatttctttgaataacttgaggttttttattattaattgtaggtatatgtaaatgagggttatatttaaaagaatttgacagtctctccgatattgaagaagaagaatttaaatctaatctatttgaatctaaatcatttaataaaaatgaatttgatgatgaagttgctaataatggtgattcataagttaaatcttttaaatttggagatttaattgaacttacaattgaacatcttgaattaatttgaggtgttagtaatggtgataaaattgtgggcacattatttgaactatttgaattatttgtaggaatttgttgatttgtacttatatttgaacttgatagtgaatcaatattatttattacattactatttgaattatgtaatgagaaagaaccatgaatagaaggtaaattcatatttgaacaaactgataaagatggagaagttaaattattttcatcaaataatttacaatcatttgaacaataagctgaaccatcttgtgataatttatcacaaactatacaataatcttcaaaagctgacattattattatatgagagtatatatatatgtgtgtttgataggatagagatactagatcaaattgtaatggatcaagtttaattatatttataataatgaaatcaaatgaaatgaaataaattaatcaagtgaaaaaatttcaataataaatatagaatagagtgaaaaatgtgatgagtttaaaagtaaacaaatacgttgaagataatatgtacaggggaatggttaaactaagtaataataagagtagaaagggttttactaggtaatatgcaaaatttttccaacaagaacaagaaacatagagcaatgtacatgaaacatggccctgaaaaagtaataatagcaaattgtgaaaaaagttcatgatatgaaacattaaaagacttctccgatttgaaaataaaatttttcattttccattgcacgtggaacgttatggaaatatttatttatttttgtttgttttatatatatggttaaggtctatttttatatacctttaatgggttatctggtaattgttattgattattattgattattattgatgtttaataataatataaggtacttaacacgtatatattgtaataatactattggtattaaacctttccatttatttatacgtaataattcatcatcatccttcatctactaatatacccaatgttataattaatgatgctttgaatgaaaatgttcaattatcacttgataatattcatcaaattaaactagaaaaattacatccagctttattacaaaaggcagattcaatgaaaaatgatttaaaattattagaattaaaattacaagaaagtagtattaatttcagtatagaggataataaaaattattcaaatttatcaaattttatagtaacttataataattttattgaattaagggaaaattataaagaattattagaaatgattaataatgttgatgaagatgatcaattaaaacatgaagcaaaattagaattattttcaattataccttcatttataaattcaattaataaattaaaatcaaatttattaccaaaacatccattttatgataaatcaacaattattgaattaagaccaggtgcaggtggtcatgaagcaaatatttttacaaatgatttacttaatatgtatataaaatattgtcaatttaatcaatggccttatgaaattttatctaaaactgatcatatttcaggttctggtataattgatgcaactttacaaattaattataatggttcatatgatcgtttaagacatgaagctggagttcatagagttcaaagaattccaacaactgaaactaagggtagagttcatacttcagcttcaggtgttgttgtattacctaaaattgatgataataatagcaattcttcattaattagacaatttaaacctgatgaattgaaaattgatgttatgagagcaagtggtgcaggtggtcaacatgttaatacaactgaaagtgcagttagaataactcatttaccaacaggtattgttgttagtattcaagatgagagaagtcaacataaaaataaagataaagcattaacaattttaagatcaagattagcttgaaaaggaattaagagagaggcaagaaaaggaaagaaatgagagaacaaatcaagtttcttcagttgatagaagtgataaaattagaacttataatttccaacaaaatagagttactgatcatagatgtaattttacattatatgatttagatggttgtatgaatggtacaaaattagatttaataattgatcaagttgaaaagaaagaagctgataatgctgcccttgaattgattaaagatattgaaagtaagtagtgtattgatagaagatagaatagatatagatatagatagaaagatagataacccatgtatatagattacgtaacgacaccgacgatcgacgcgcttattttcttggatttttaagatttcaattatgtagtgtatttgagattatatatacatgaatttgccctccaggtaccagatatttcatttcttaaagaacaatgacaattccttcaatacaggacgccgataaagccttcactgataaagattatcaaactgctgaatctatttatcttgatattttaaatattgatataaataattataataatgaaaatagatcaaaatcagagaaaataattgaattacaagagaaatcaattataaacctttctaaaatttataatatcaatgaagatgaatcaaaacttatagaattaattaataaatcaaaaataattatgagtggatcatttgcaaaaagtaaaacttctaaaattatcaaaattttattagatgttttagaaaattcattcaattggaagaataattcattaactaattcattaaataattcaattaaaattacaaatgaatgtattcaatggtcaattgatcaaaaaagaactttccttcaacaatctcttaaaattagattatcattattatattataaaaataaaaattatatggaatcattgaaaattattaatcctttaataaaagaatttaaaaaattagatgataaaacttctttagttgatgttcaattattagaatgtaaaaattattttcaattaaaaaattttataaaatcaagagcttctttaacaagtgcaagaacaagtgcaaattcaatttattgtccttcatcaattcaagctgaattagatttaatgagtggtatattaaatgcgcaagataaagattttaaaactgcttattcatatttttatgaagcttttgaaaattatcaattacatgaaactaaaaatgatttaaataatgaaattgaagataataaatcaattaaagtacttaaatatatgattttatgtaaaataatgattgaaagaattgatgaaattaatcctttgttaaagcaaaaatcttgtcaaaaatttattaataagtcagatattgaagcaatgaaatcagtttcaaattcttataaaaatagatcattaaaagatttagaaaattctttaaaagtttacagtaaagaattaacacttgatccaattattagatcacatttatctgatctttatgattcattatttcaaaaaaatttattaaaattaattgaaccttattcatgtatagaaattaatcatatttgttcaatgattggattaccaaaagatgtaattgaatcaaaattaagtaatatgattttagataaaataattttcggtgttttagatcaaggtaatggttgtttaattatttatgatgaatcaataaaggatgaatcttatgattatagtttggaaattattaaacaaatgtcaaatgctgttgatttactatatgaaaaagcttcaactctaagttaataattctaaattatatacttcttatataataatataaactaaaatatctaactaacttttatatataaataccttgattattatcaccatataatgaacaactgatacttgcaaattttgttaaaaatgttgataattcattagttgaattgaaaatttcataaattttaaatctttcatcagctaaaatattaacaagttccttacttttatgtataaatttattattatgagaaatattataattcattattaatatatcaaaatattgattaaaaatatttggaatgtaaattcttcttaattcaatgaaaacttctttatcattatcatcatcactattatcatcatcattagctaaatcaaataaccatgttttaactaatccatctaatgataataataattcatttgtcttttcatcatctttatcatcaattgaatattctgataataatttgaaagttttgaataatttatgatactgtgttagttcaattaatctctttggtgataatatatcagtattatcatcaatattatcatcatacattgaagacttaaatttataatcatcaattaattttggtaatgaaattgattctaagaattcaattgctgaaccaatttttaccaactaataaaaatcttctaattaaaattataattgaatctaatgcatcaaatatcatatttgaatcaataaaccaataaattgttgaatataactttttatcaatttcatcaatttcataaattaattgaatttcattattaattggataaaattcaattgtttcattaaatgctttctcaattgtatttcttaagatttgttctaatggtaatttaaatatcctaatattattaatttgattaattctctcatttacattaaattcaaattgaaataaaattgttgaataaatttcaattatttcatcattatttggaataaatgatatataagttggcaccaaatcatatgatttatataacattaaccttattatataacatttcaataatttaatataatcgttatttgaaattaattcctctccataaattaattgtaaaattattgataaatgtgttaaaattcttaataaatatgattcattacttatttcattttgtaaattttcttcattatcattttcatttaataaatctaatgattttattgtattattcatcaatgttttaacattatctgatattattgatccaattaaaactctaattgaattcttactttgttccttaattgatatattatcatcatttgccaatttatttaaaatatcatcaattgaatttgaaattaaaggtggtgattttagttttttcagtaattcattattattattattattattattactattattatgatcatatttaaaaatatttgattcaagtttggagttaaatagattatctaaataaaggtataatttttcttcccatgtattaaccatttgatttgttgataaaaaatcagatgataaaaatccataacatgctttttcataattttttgtttcattttgacataattgataaattgttctctttcttaataatttattcattacaccggaaggtattgtattattagaataatcatttaaatcaataattggatcaattctatcatttaaaccatttaacattaatgcgaaatcccaattattagttaatgtacataaagttttcaattcatcaatttcatttgacattaataaattaaatgctcttttaaaaaacaattcatcctttaatttatcattagtatcaattgacaatccagttcttagtggtgcatccaaatctaagttcttgactaatgatggatctttattaatattattcaattttaaagtggtattcaaccatttaattgtctgaaaatcaacatcgtcatcatcttcaagatcattgccattattatcagtatgtgatgggaaatctaatttaaaagtatctgataatgccttcattgatgtaaatatttgtattaattgattatctgatgatataatttcatcagttataactgtttcagatgaatattcacaaatattttcattattactcttatttctttgaagttgttcatttgatagtaaatctttattaaatttaacatctagcagagattctaaaatagtccaaaatttacattccagtacccaattagatattagatctacctgtgatggatcagattcatataatgttattaatttcttgtaagttattagtttaaaacctaacgcaattgaacgtagatcctcctgaccgaaatctattctgaattttctcaaaacacctgcaaatgatgaatgaatgttcccatcctccacttctaccattatcgagtcatccattatgtttctattgctctgtttctaaaagaaaagttgtgtaaaatagctgagcattaaggataacaaatttaaaatttcaaaaaatagcaaaaaatgagaaaccgtacaccaaaatttcgaataatcgtgttgttgaagctttaatgcagaataatcaacttaacactttatcaaggcgtatcctgttttgattgcgctagaactacacatatagaagggtagaatagacaatggtggaagtatcattggtagtaggtaaactggatgcatccttagcattattattaacaaaggatcatcatttaattgaatttccaacaattttattgccagatggaataacaactggttcaattgttaaaattaattgtcaaagggatattgaacaagaaaatcttgaaaggaaacaatttaatgaattacaagaagaaatatttgaaattttcggtaaacatgaacctgaaaatccaatattgaaaattgttaatgttacacaaacttcatgtgtattagaatgggaaccattaaatttaggtacatcagaattaaaggaattgacattatataaaaatggtgttaaacttggaccaatcaaaaatccttttcaaaagaaaaatattaaatttagtggattaccaattgatacaccatttaaatttcaattaaaattagagacatcatcaggtatttattattcaaatttaattgaattaagaactcataaaatgactgatttatcaggtattagagtttgtattggtgatattgattataataatgaaaaattctcatttactgatttaacagatttaattaattcaattggtgcaaatgattattcaactcaagttaaagttgatacaactcaatttatttgtacaaaagattcaggtattgaataccaaaaggctaaaaatatgaatatcccaatcataagacctgaatggttaaaagcatgtcaattagagagaagaattgttggtgttaataaattttatttagataatgaaaatccaatttggaaatctaaaaatttttgggaatttgaaagtaatggggtaattaataacaatgagacaaataatgagaataataataataatgataatgacaaaaatataactccaataagtaatattgaaaacaatcaaagtattccaaatattgttgttgaagatgaaaaattaaataccccaactcctcaaccagctgttgaagcagaacctgttgaagaacctgttgaagaatctgttgaaggaccaattgagtctgtacctgttgaagaacctgttgaagaaacaccagtagcagaatcagaagctgttgaatcattaccagtcgaggcagaaccagttgaagaagttccaattgaatcagaaccagttgaatcagagactactgaaactgtaccaattgaagaagtaccaattgaagcaccaatcgagtctacaccagtcgaatctgggccagttgaagaagtaccagttgagtcttctccagttgaagaaataccaattgaacaaacagcaccggttgttgaacccgaacaagtagaatctgaagttgaaactaatgaagtaaatggagaaccaacagaaccaattgaagaaccggtagaggaaaccaatggagaatcaaaggaagaaccaaatgaacaagtagaagaatcaaatactgaaccaattgaaacaattgacaccgctgattctccaatcagtccgtcagaaattgaaccaacaccatccgaatctataccaactacatcagacgataaggaaaatgatagtgaaatactagaagaagttgatatatcagaagaaaccaataataatagtaataataataatattaagaaaaacaacgataataaaaagaagaagaagaagaaaggtaagaaatgatctgtgataaattagttttatataatattaatatagtattagtatataaattgtagactttattttttttttcaataaaaacctataatataatataaacaacaattaaagctaagaaaaggggatatagttcataataattattttaagaatcaccaaataaacgtctaactttccttaaaactgaatctttttcaggatcataagggtgatcttttgaaggtatctctaaaattgcagggaaagcattactataagaatcaatttcaattctaattttatcagctaaatgttgattaattaataatattgcaatatcatttctatttatgaaactattaaaagttttcaataattcatcacttgaagtatcatcattacaaattttaaaattagtttctttaccttcctcagttgtaacttgaccaattcctgctaataacataccagtaattgtatcatcatcacccatacaagcaagaagagttctattcttagcttctaatgccattgctctataatgtctataaagaatatactgataaagcaatatcgaatcattcactctattaacaatcaatgcagccaaattttgaggtattcgagaaagataatgattttacgtaaagttacatgaaatttcaaattatttcaactatttcttaagaccgtggttacaattatttcttttaagagtatatttattggggggataagtataaatgattaatagagttaatatcaataatattagaaatttccatacttgtagaacattattatcgggacatagtaaatgggctactattaaacataaaaaggctgcaaatgatgcagctagagcggcagcatcatttagaatgtcaaagcaaattcaagttttcgccaagatgggtggagcagatttaaatcaaaatattatgttagctaatgcaattgaaaaggcaagagcaataaatattcccaaaaaagttattgaaagtgcaattaagagaggtacaggagaattaaagagtacagaaaagatggaaactgttgtttatgaaggattagcaccgggaggagttgcagttataattgaagcaattacagataataagaatcgtacaattggatatattagaccatgttttaataaatataatttaaatatgacaccaacattatacatgtttgataaaaagggagttttattaattgatattggtaataagacaagtgatgatatatttgaagaaatgattgaaattggatgtgaagatattaatgagattgagaataatagtaatgaagaagaattaattagtaaacaagttgatgaaggtaatttaattgaattaattacagatccaaaagatttaggtaagattggtaaaattttaaaagaacaaggatataagattaaagaaatggggattgaatatcttggtaaagaagatacaatggttgaaattaatgatgaggatacaatgattagttatgaaaaatttatgtcattattagatgatattgaagatattactcaagtttatactaacttaaaggaggagtaattggtatgatgattgttctgtatatagcgtatgtttacaaatttttttaaccatatatgaattaatagagattttaatattataatagtaatagtagtatgaaatatgaaatatgagatgaattttttgatgtaatataataataatgatagagatatataaattaaatataaaagagaagtcaattaaaacttaaatttattctttcttttctaaagcttcttgaagtttatcatcgaaaacaggagcagatctacctaatttaagagttctatcagttgctaattttttataactgaaataagttgcagaacaacagacaacgaaacaagcagcatataaaggatataattcaggtggaacgtggaaaagtgattttggagcagcagagaatcttgggaaagttggtctcattgttaattggttgttagaaagatacaatacaaagaagtcaagtatcttgaaggttagtaaataaatttatttaattcagtttaatcaatcatgtattatatgttaatgtggtctcattgaagaaaataaagggtgtattacgtaatacattgaatagattaattatccaataagaacttagtataattaaaatgaattcccagtactggtgtacctggtgtaatgatagacgcgtctgtcacgtgattgttttattttatgataaaaatacttaaataaattttcactaaggttaactccccagtggcgacgaaaaggttaaaatttcacagaatttcacttttaaacagagccttcaattgatgatatcaggattctgtttattttaattttatttatctatatctttatctatatcttatctatatcttatctattacctctctaaggcttctgcatacacttacaccacttcatcactttcaatcatgcagaagcacaattatcgtaataatggtcataataacaatggccataacaatagtggtaacaatacccctaatagttataataataataataataataataactccaataataacacaacaataactccaattcatatcaatcacagaaaacttcacttactccatctgaatttgaagctgcaaataaacatatgaaggatagatttgtttatgctttagcaaaatctttaggttcaaaaattattgttcacaacttttaataatacaattactggtattttatattcaattgctgaatttaatgattttataccttcaattataattaaatatccaacttctgattcaacagttttcaatgatgaattattatatattcaatattctcaaattcaaatgattaaatgtaatcatattaatttatcttctttttcaaatcaaaaaaaggatattgatattattaatactaataatacttcaaatgatcatttaaagaatgaaaaattagatactaaatcagaacctaaatcagtaggtaaatcagaattgaagaaagaggttaaggtagaatctaaatctgaaccaaaatctgaaccaaaatctgaaccaaacttgaatctaagcctgaatctaagcctgaatctaagcctgaatctaagcctgaatctaagcctgaatctaagcctgaatctaagcctgaatctaagcctgaaccaaaatttgaatctgaatctgaatctaaatccgaaccgaaattagaatctaaactctctactaaaccaaaagttgaaaaattagttaaacaagattctaaatcatccattaaatctaataaatctgaaattgaaaaaaatccaatagcagaaaagaaaacagaatccaatattgaatcagcaaaaaaagatttatcctcatctaaatattcttttaaaactgacactgatatttctaaaacagatactgatatctccatagataaagcagaagctagagcacttaaatttcaaagatgggtacctgataatgaacctgttgaaacttattcaagtcaaattaaacaaaaaattaaatcatcaattagtttagaaaatgaattagcatcttctaatcaaaatgaatatgaatatgatcaatttaaaacaatgaaggaaaaattcaatattgatgcatcatttgatgaaagtgaatatacaagtaaattggatacttcacatcctgattataaaaagagaagagaagcagctgaaaaaatttctgatgaaattcttaaagctggtaaatctggtaatgcacatttagatgaagagagaggtatagaaattagtcatgaaattatggatgaagaagataaatattcaggtgtttcaaaagaaaatgaagaatcaagtaaaaatttatttaatttattgaaaaattcttcaaaggatgatttaaaggataataatgcatcaacttatacattaactccaattaataataataccaaagatttacctaaagttaataaatcagaaaacacttctaaagctgaaaaaattgttgaaaaaatttctaaaattgaaaataaagttgaaactacttctaaaagttgaaaaacctaaatcaaaatcaaatcaaagtataactacacctactacatctgcatctactacatccgctacacctactccagctgtcataaaaaaaccatcaactgtaccatcatcatcatcaactactactaagaagaaaccagctactgataatgaagtaaaagaaactttaaaacatgttcaacaaaagacacaaacttcaatttctacatcttctaactccagcttcaacaagtactcctttaccaactactacaactactaatataacaacaccatcctcatcatcctcatcatcatctgcatctgttaaaattgcttcaattcctccaaaaccaaaagctcctacatctcatagaaactcttttaattcttatcaagcacccccagttaataattataataataataatttacattcaccacaacaacaaatgcactcaccacaacactattataatcaaatgccaagaactccacttgtgaataataataataataatcaacataataaagttcataaatttaaaatatctaataaatcattagtttcaaaggataattcatcaatagatacaaaatttaacatattattaacagctaaaaaggaatatttgaattcaacaaaggatgaaattaaacttgatataataccattagtaccagcatttaaatcagaattaagttggtataaatccatcaattcatcatataaagatataattaaatcaaaacttcaatcagatgtaatgataccaccaagtcctcaaataatgtatggaaatgcaccaattaatcaacattattcacatcatccacatcataatcatcatcataatcatcatcaacaacatcatacagtacaatatatttcaccacaacaatatattccaccacaacatccaatgcatattcaacaacaaatgggatatcaaatccaaccaatgtatgattatgctcaatatgcaataccaccaggtcaaggtcaaccaatgcaatttatcagtcctaatataccaccaaatccttatatgatgatgccaaatagtaacatgatgtataataataataacagaaatcattacaatggtaattgatgataatgttaaatatctttttataaacttttgtaaacattgttttatacaatataattaataataataaaataataaaaatatttgaaaatcaaactgaaaatagatcttattacgtcaaaatgaatttaacggtcaaggaacaaaaaaaaatttttttttcagataatttctttatcagttctttatcaaaaaaatcgattttgatagctaaataactaagcacataaaatggaagatccaacaatttatcgtatacttggaccaatttacatttcctcaattttaccaattgaacaagaacaagatttatttgaatcacataaaattacaacaattatttcaataactgattcagatataccaattaaatataaatcatcaccatataaaaatattcaaattaaattaaatgatacaccacaagatataattttcccctatattggagaaattaattattcaattgcagagacaatttacatgttaatccagatatggtaaaaccaaaattatcaggtaatgcagttttaattcattgtcaatcaggtatttcacgtagtgttacatttgtttgtgcatatttaatgaataaatttaaattaagtttagaaaatgcattacatgcaattagaagaaattatccaaatagaacatttgaaccgaatgaaggatttttagaacaattagaaatttataatgatacagaatatacaactgatttacaattattgaaaaataattcacctcgttggcgtggttatagaatgaaatatttgaattaatcaattatatgatgaagataatattaataaagatagttttagtgaagtttcaaaacctgaaattaatgataatttatggtttggatttcaatgttgtaaatgtcgtacattattagcaaataatttagtttatgtaccacatttaccaccatttgataaagatgataaacaattatttttctataaaagaggtttgggtaatcaaattgcacaaaataaatgtactcatattttcactgaaccattaaattggatgaaggataaaattcttgaaaatgatgattcattacaaggtcgtttagattgttataaatgtaattcaaaagttggtaattataattggaaaggtggtagatgtagttgtggtaaatggatgattccttcaatttatctttataaatcaaaagttaatcaaattgattcaaatggtaaacttatctacaaaatgatcctcgtgcaatataattatgatatagatagaatagaattgtatatttaattttaatcttcaagtatattggtatttgaactaatttcactccattgaaacttgtgattctcttgtagttggatttgattgaaaatcattatcaaatgattgaattcttttaggtattggtttatttaataatgttgaatcttcattaaaactactttgtagcatttcatgattatcagtatgatcattataatgattttcttctacctgctcatcttcttcttcatcattcatcttcttcttcgtagtaactaataatagcttcattacctacatcttcataatcttcatcatctgattctaattcattcatttcattattattgttctcatgaccatattcattattcaattcatcggaattatagatatattgattagaattattaattaaatcatgattactcaattctgcatctaaatctccctgtaaatcatcatcattaacaccaacttgattctgtacaacttccatctccatttccatctctgaataattactgttattactattattattgttattattattattatttgattgcatttgattaatattctcccccatcagatgaatactttcattaatatttctttcatttaaatcattatttaaaacaccaaattcattaatttcatcattaatttcattatcttgttctatttcattgaaaatttcattatcttcaataatttgtttcattgttttattaattccaattgatgttaaccaattatatccaaatttattaatttcatttaatttttgttgtttaatacttaattctaaacttaatgtttcaatataatcattttgaaaccttttattaatcaaatttttaattttattagaatttgaattatttgtaaatggttttggtttaatacttgtatatgatgataatggtggataatctgatttctttacattattgtttaatttagaatcattagttgaattgtattgtaatctatctattatattgggtatatacattgcacatgtatagtaaaagaattgtgtggtagatagatagaatagcaaaaatattatccgaaatacatgatttttcttaatatttcttattatgcctatatacaagcttttatctatataagaactatataatttataagaataagaattaatttaaagttttttcagttagaattattaaagaaacgatcccattgaccttgtttatgtaacattgctaaagctaaaaccaatggtaattgccaaattgaactccaaaaagttttctttgcccaaatatttgctaaatcaatttcactcttatttgcaccaccatttttaataacattaattgaataattatgacgttgttgtaaccaaaatttaaatgaattataagtcatccaaaaatttaaaattgatgaatcaaatgcaaaatatttatcacaaacattaaaataaattaatgaaaagcaaattgggaacattaaaagtgaatatcttaatgcaactcttgcatttaattttggattaacaaaagctgtcattacataacctgcccttttatattcatctttaatattatgacttaatgaattaaaatgtgggaattgccaagcatataataataaagctaatgaccaagcaccaggatctaataatgaagaatttgatgcccaacccattaatggaggtatagcaccaacaattgcaccaagccaagtatttaaaattgattttctctttaatgatgtataaaaccaactataaagtataatattcaaagcagctaagtatgaaacaattggattaacaccaataaataaaattgtacaaccaattgaaccaattattgatgcaaatgtgaaagcttcataaggtttaacctaaacctttaacgacaggtctagttgatgtacgaaccatttgtgaatcaaattttggttctctacccatattaattgcatttgctgcacctgatgttaataaagtaccaattgttaatgaaaaaaattttgtaaaatctaatggatttggagctaaaatatatgaacaaattgatgataacataattaaaaaagttaaatgaggtttagttaatgtaatatatggattaattaattgtttaaaagatttttcatcaccttttaaatattgttcaataattgattttttatttattaaatcattattttttattttaacatcgaatggtatatgagaattatttatagtagtagatgatgatgatgatgatgagtatgaattaggaagtagcagttgtagggtgacaaatttgacttacagtttcagttgcagattgtaatttacttgatgaataatttcgagtggaaattgagttatgattattattattattatgattattatgattattatgattatgattaagaatagtatttttattattgatactgatattaagattatgatttaagttataatttgaagtgaatatattattatttgatcttaaataattatttgataagaaactaaaagatggggaagtaaaattttgtgaagttgaagttgaagttgaaacatatcgccttgaaatcaggtgtagtatatgattctgggaacccataattatacagattacagagtgatatactgtaaatatatttgtacaaaaaaaggaacctatagattactactattatcaatcaatcatgctgtgtggtgagagttgatttaatataagattaaagttaaaattttattatgtgagcgacgcatcgtcgtccgcagtggtttattacataagcattattctatacagttacagctgttgatttagcattgtctattttattatcaattagattgtggaatgcaatgatggaacggacaagactagccacatacattatcatcaattgatcatttgttttaacattgaatgcagttgaaagatttgaaggtgaattgagatcaatactggtattattattattattattattattatttattgaatcagatatttgtgatatatttggtaaaagattgaaaatatcttgtaatttacctaaaattgttgaattaattggtaaattaccattaattaattttgttaaataaattacaattgaagataatttatcattaagagatttaagagatttaaaattatttgataaattaattgttaaattacctctattttcatctctaatatctcttaataaatgttcaacaccaatttcttcagcttcttgagcttcaattgttgaaggtaaatgaataaaagtttgattaattaaagtaccatcatcattaatttcatcaaaacttttataacaatcagttggtatatcaattttattatttgaatgaacatcaacaattaataaaattggatttaaagttaaatttttgaaaacattattaattttaagatcatttttacgtaattttggaccagaatgataccaaccaattaatttttcctttgcattaatttttttaaacatttccatcattgtatcaatataattatgatctaaaaaccaaatatttggattattaatatcttcttcataaggtattgcaaaagaatttgtaattttaggattatttggatcagaattatcacctaatataacaccaactacacgagaaggtgaattagaattatttaaattatttgaaggagttgaattggatgaacgtatgacacgttcatagtgatcaacaacagatagcagtactagtggagcaacagagacaaccattgattataaagaactaagatacatgattaataataaagatataactatttgccctcaaaaacatgcatgtaagaagatctttactttaaagagagagattcaatcacttacgtaataccataaacactaaatttccgacatgaaaaaatttgacagatttttcacatgctttagtatactagctttaattacttaatagtctattacatgtcaaattttattgattaattgatttattgatttattgatttattatctcttcttatctttcctttatcatctttctttaggtcacacgatacatctcattaatatctcatcttattttattattatacctttcattttatagactctctcattatttatacctcaataattatgtcaatgatgaaaaaattatcagttaatccattacatccaattcgtcggtttgcaacaataccaaataatcctcgtttattaccaaaacctccttctccttcaactccaactagtattgcaatgctggcaattgtaactgttggtgtatttttgatatatgttaaaaataataataataatgataataataataataataataatagcaatgatacaaccgcttatccaagaccaacttcttggcctttatttatatattcttggttacctttaaatgttgtatctagaatttggggttcaattaataatttcattataccaactcctttaagatctcctgcttttaaattatattcttttatgtttaatgttaatttaaatgatatgcaagatcaaaatttacaaaattatcaaaatttatcacaatttttttatagatcaattaagaaaagtgttagaccaattgatggaaattcaattttaacttctccttctgatggtacaattttaggttttggtaaagtttcttcaaatgcaacaattgatcaagttaaaggtataacttatactttaaatcaattattaggtactcctgaaagtgataaaataattcattctcaaatacaaaattgtcaaatttgtcatcctgatattgaatcaaattctttaaaacatttaactccaataccaaatttacatcctcatgcttcagttttaacttcaaatccttcattaccaaatttaccaactttaaaaataatactgctagtagcaataataataataataataataaagactttattgaatctgctccagctccaaatgatacaatacctgaaaatgatttattttatacagtcatttatttagctccaggtgattatcatcgtttccattctccaactaattgggttacaacaactcgtcgtcattttatcggtcaattatattcagttgctccttatttccagaaaactttccaaaatttatttgttttaaatgaaagagttgcattattaggttattggaaatatggatttttcagtatgacaccagttggtgcaactaatgttggttcaattaaattaaattttgataaagatttattaactaatacaaatcgtataaatggtgttaaagttaaaaaacatacttgttatgaatctcattatacaaatgcttctaaaactttaaaaggtcatcctcttttcaaaggtgatgaaatgggtggtttcatgcttggttcaactgtcgttttaggtatttgaagctccaaaatcttttaaatttaaaattaatgaaaatgaaaaagttaaaatgggtcaagctttaggtgatatctaatttttaagttctattcccacatttatttatctatttactcatatatcatatcttatttattcaaatcaatccttttatatctttttttatacagtatctgtctatttataaagaaattattccgccttacttttgaatacttccctctttaacttttcgaataaattcaatactcaaataacttaatccactctccatatcatgattattattataacagtgtgttttaaatctatgattataacgattccaaacacctctctcaatttcatcctccatttcaatctcaatttcttctccattactatttttaacccttcttttacgtcctttactaattataactccatcaacataattgaaaattaattttaaatcatctcccatcttctttttctcaatcctcttgtttaaattcaaagacactcatctcttcacatccttcttcaaataacattctcttttcattatcttcaaaattcctaaaaattgctaaattctttaattattaataccttcatcactttctacacccccatctccatcttcttcactatcttccttcatttttcaaattcatctcaatcatttctctcatacccatatttaatgtcttataatcctttcttctttcaacataaatagttaaatctcttgaaaacctttcatttgcttctctattagatctaactaaatcaaattcaacttcataaaaaaattcattcctaacacatattttcttaatcaatctcaaatcaggtaataaacatggactaataacttttaacatttcatcattctttaaaaatatttcaacttcaatattagtaactttactcttttctttaccatcttcaacttttttaacagttaaacatctattctcaactcccattgtccaaaaattcctaattgcaccttgtaaataattatcttcttcaatctcactattaaatcttggataaattgatgtaattaatgatgcaatactaaataaatcaatattattaaatgcttgttgtcctccaccctaaaaataaaaatcctaatgacatattaacaaccatataattcccatatttagtatatttatcactaagtccttgtaaaaatcttaaccttctcattatatctaaatcaccactgcctgccattataattgataatcctaatataattaaatctctaatacttctaattgttgataatgtaactttattatcataattaactggtttcatcatactcaatcctaataatttatcaaaatattcaagtaatatctttttagcttcaatattaccacttgatgcaaaacaaattgaaatggataaaattaaaccacataaaatatttaagtattgtaagttgtcaatgtttaattcattcatatcttcaatactacttctcattctaacacattcaggtatttgactttcaataaattctttagtaggtacaatttcatcccacataatcatatttttacataataccctaagcattaataaatcaggtctaacataatctaataattggttactctgtggaatttcaatctttttagcaatttcatggttattactcttcaaaaacataaacattaaactaattatagcacctgaacatgatttatcaaattcttttctaataaatgtaccatatgaaattaattcatcaattatatgactatcattactgctcatcatattatcacctttacctaaattaatatatcctagtgcaataccagcagctaattgataaccttcactaacaacttttttatcattaataactaatgaacaacaaatttgtgttaataaaatctcactcattcttctatgttgactctcaagataaattaatccaattcctattatacctgcagtttgaactggtaattgaacatttagatcagttgatcctggtggtaaaaatgcaacaacatgaacagataaaacttttgtcattttaatatccatactacctcttaaacttgcatgacataccaatcaacaatccaatacttgtaaaaatatgtttaggtcctaaataattataaatatgccattcttcaagttgcttcaaatggccatttaatcctaatccaagtaaaaatcctgcatgttcggaatttaatttagtaggtttgttaaataccacccaactaccactaatttctttaaaatctttagatactaataatcctgcgctgacaccattataaaaataaccacactccattaaatatgaaggtattgcattatcttctaacgtaacattaagattatctggtaaaattaaactggtaaaattcattttaggtattggaaatccttcagtgactaatggttttttactggaattgaaaacagcacctctaccaataggagctgttagtgttcgtaatgcaattttaacaccaatagatctttggtgtaataatctttcatgatcatctcttgtggcgctagattcgtaagtaataatttgtggtttagaggtttgtaaaagtttgatcaattcataaaatctacgatccttcgcaaatatcagtttagtaacattgaatttgtcaaactctaggttatcatcccaagaagtgtttgaatgattatcgttatattcatcattaaaaagttcaaaaataatctcctttgtacttttcaaagttgatcgagcttttttattatcagcaattgtcaatgaacgtggactatcataatcaagttgtagaatatcctttcttccaattaatttacactcctcgttagtaatattccaattcaatttaactttccgttgacataattcaatagtattcttaaacacaaaatatataccagaagggtacgtctctaattctgctgtatcgatattaaaagaagccatagttctaaccaaatccatatcttcaaattcatttgatacaatcacttcaaataatcttaaaatattgtacgttcttgtagtgatgattttatccactgattcatcctctcctgaaataattgaaaacgtaatgtatgaaactaaattttcagaaaataaactgcttatggactctataatgttaggaggcttgtttatatattcaggtaatgctagttgtaaattcttatcgaccaagttttcattaatatcataatattgtttccagccaggagaccatgacatccaataaacaagttgtgaaagtaatctcgatagttgatcataatgactttttgacagaatatttaatttcaagtcttctctaataacgtgtaatgctagtactattttaggtaataatggctcaagtgaaaaatctcggtgatcgttaagtagtatagttttattgttaattctagcaatctcaacatattttatcaatctagtgatttcgttcaaattagtgttaactgaagaaagattaattttctctggtaagcacatcgataataatgtcacaacataaagtttccaatcggtgcaatggggtatatttatttgtttgttagagcaccatctaagccaaaacatttcatgtatcaaattatgactcaaatattccaaagatttgatatatttttcaacatacttatctttgatattcattgataagtgagtaaggtaatgttcgccattttctgaaagaaatgagacttcatagttttgacatccatcaatttctatcatttgttcattttcaggtggatgtacaatcatcggaggtgaaaataaatcgtaaaatggattatagagtaaaatttgattgtttttttttaaaattaagatgtatccacatttccttccctccatatcaaatttatgtgcatcaagtccttcaaatgtgagatgattcttcaatttacttgacgtacttttattttgcaacttttcaaaattataaacatcaatcatatgtctttgtttattcacaacaacgagagtttctttgtcatgaaatgatacgttaaaaacttttaaatgaatgatatcagatttgactggtattgaatgaagtttggtaaaaataacatcttttctcaaaacccaactttcagtagttgatgcaggataataacctgttgtagtatcgggaaggtattcagtgccagaagccattctatcaaatgataatggatttgaggtagatctcaattgctttgaatcttcatcatgtattctcgaaatggatatattcatcattgcacttgaagatgatattgtacgtttactgtttttcctactttgaacatgattgttcaataaagctttagatttggatgatttggatcttgacaaatatctgatactgtacacattgatatttttatcagaatgattaaatgtagtagctaaacaagatgatgttgtttctggataagttaagagttgttcagtttgagagaatgaagttgtagatgaagatgctataatcccaagctctccgactgaatctgtaagagtcaaaaagttgctatctacaaatgatcccgctgaagaattagtaatacctgctgagaaaattgtgtttccagaaccaattgatgcagatgtgtgttttacgtatggtgatgtaatatttagtccatttgatgttttaattccactagtgaaaaattgatcgggtactgatagtatatcaagtttcttaccaataattaagcctttatggaatggaaatgcatttttaatgtgtattggaaaactaacaaccaatacagatgttagcttatcataaactctaatctgatcttccaatatgactaccaacactttagtttgtttggagctgttattgagttttgaatcttcaaatgccgtaaaaaagctatccacaacttgtgtctctaagtttattcgacgaaaggcgacgtcaccggtaagccatatcactgaatacttgaaaataagtaacttttggttgccttcatacatctttatttgaaatttttcgtttgccaaatcatcgtgtattatatctgtaacttctaaggcttttaatttaacgacacattttggaaaatttatgttattattactatccgtttctgtatccataactgtagaaaaggccaaattatatctaaaactcaaagcagagtacgaaaggtaaacattgaaacaaagtttcagatcttcagagcctccaaaatacgtctcaatcgttaaaaatgccccttcaaacggcgcgtcttttcatgtacagaaattgaaaattacatggcaaccctttatgattgttgatttttctgtctttaatctacaccaaaccttgatctgctcttttttcaaacttaacaatcagttgaatatttaaagggcaaagtaaaacatgtcattttttagtacaatcaagtatgtattaatgttttaaacactaagaattgattattcatcgaattaatactaacttttcatttattacagaggtttcacacgaagttcaaagaagaaacaaggaaataatcaaaaatatgctgaatctaacttccctaacgattcggatccatctttggtaaatcagaatagcttatattccaatagcaatatttcaggtgcatcgttgcgtaaaacgcagtctccatctaaacaatctgtaagatcatacaaattttcccaacaaccacaacagcagcaacaacaacagtatcaaaatcaacaacagcaacaatatcaatcacatcaattacaccaagaagcatcaattcaaagctttggacaatttcaggaacagcagacagttcaacagcatcccgtcaagaatgtagcaacacaaaacccccctttattcatgtgtgaaccatttataaagacagctttagttaagggttcttataaaactattgtacagcttcctatgtacgttgatcgtaatgaatggcttgcattgaatatatttgaattctataaccatttaaacaaattttatggtgtgatagctgaatatgtcgtacctgaaaaatatccaacaatgaatgctgatcctggtactgaatatgtttggataatgccaaataataggtcatcttcattgcctgcaaatcaatatattgaatatgcgttaacctggataagtaataaagttaatgatcaagcagtcttccctaccaaatcaggaatgacatttcctccatcttttttgagagacataaaaggaatatcaagacaaatgtttagaatcattgctcatatctactggaatcattttgagaagttggtacatttatcactagaggctcattggatatcgtattttagtcacttcatttctttcgtgagagaattcgatttaattgaatataaagagctagaacctttaagtatgttaatcgataaccttgaagctcaaggcagaattgttaaggttcaaagaaattagtactgatcttaaaagacaaaaattacattctataatattttttacgtttttaaatgttttttgattttaaaatagagtttataaaactatatacatgaactactcctaactttaaaaccaaaatcaaattgtaatatatagccaccaaatgtaaaaaaaatcattgtaatgaagggaaaaactaaaataaactgtagataaaataaactgtatgattactctatgaagaactgaaattaatgaggggtcgtcaagtgtgataatagttggatgaatatgcgattgttgtgtttaactggaaaatcatgagaaaaagtaaggactatcttgaacaacagagacatcaaactcaccctttggaggaatgtctggtaatgtaaatggaactaataatttgaattgaccagtattatctacaatggtatcatgaacataacctatttcatttaatacagaaatagaagatctgagggacttaccaagttcaacttgttttggatctttggaattaagtagtaatcttctttctctttcaatcttaacttcatcaaggaatgttggtgctctaccaagtttcttagctaattcagctctatattgagaaactgcttctgcaacaggtgtattcttgtcaacagaaattaccatcaagaagccttcataacgtctttcaaattcaccttttaatttttcaatcaagttatttttatgtaatctgataaactcttctcttaaaacatggttcataacatcgacatcacaagcatgagtccaataagaatcgtggacagatgaaaacagaagaccatattcggaacatttattaactgacattaacatgtgtgtagcatctaaggagtgaatgaaattaggtgggaaaccattagcttgttttctaccatcaactttttgaacaccatatggatcttgaataataaaagtttgcatattggttttaactactttattcttcgtacttctgtaaggttggacaacaggtaaacccaaaggagaagtccaaataactgaagaaataaactcatcgccttcttcaggttcaacatctaaccttatactctttgaaattctccttgcggcaagtgctaaccaatcttgaattgcatgagcaccatcaaataattctctaatagctctaaaaaccttacctgttaaatattttgaacaatttgatactgcatcttcatcaaattcgatttcctttaatctctttgtgatttgtgctcttgcaccaacataagtaacaccataaacagatgtcataacagtttgcttgacaatctttcttgcaataataggtaaggttaattcagcttcaagcacaccatcttccttatcctttgtaacagccttgataacagaattagcaacgtgggtataaacatcagatggtctgtcagctggaattaaattaacttgtctagcaccttcaaaatcaccacctaatgcagcataatgttgtaaaccattacatgtaccatcttgatgaacaggttgataagaaacaaatttagttggatctggtaattctaatgcttcaattaattcatttgctgcagctaaaaattgccatggtttatcagcactcttccaccatcctttacctcctaatggatctttaacagaatctctgattaattcaatattatcttcaatatattgagctctttcgtctaaagaaatcttatctttacctcttaaattggaaagatgaattttcagccattttaaaccgtgtgcgcctaattctttaccggtccaaaatttaagtaaacttctagacatatcgttacctaaatgattgaaatttggtggaattggatatgctctacctctaaaatctaatgaatgtgggaaaaagattctttcaccaacaaaagctcttgcaatttctaatttataattcatatcgcatctcattgatctatttttggagtattcgttaacaatttcagtacaagctcttctatatttaaaaacttcaactgcttcacaacctttttctggtggatttggtaaaacaaacttttcatcagcttttgggatttctaaaaattcttgttcagtattccaaactttagtaatcaattctaacatttttttattaactgtccatggagtattacccagattatttaaaccttgtaaaactctatcaactttatgatttattgcagcagcctttgcataagcactttgctctggtgaatttttagctcttaacattgtgacttttttcaaaaaatagccaccatcattatgtgttgtccatggttttggtctacatatcattggtaaatattgtgcttgaattgattgatctaaacgttcttttcctaatttatttgcaaaaccttgattaagtttaataacaccaatacgtccaccattttgaaaatcatatgtgtgatagaaagctggggctaaagctaccttggtttcaccagttcttggatctacaccggtaacttctacctttgcaacttgtaataagaaagaaagtaataatgaaccaatacgacataaagattcagcatcccatgacaaactacttgattctgaatttatttgattttcatctaaggttgctttttcaactgtttcaacaatttgagcagcctttgaacttcttaagaacttcttaaattcaggtgtatttttaattgctttaaaatttttatgaacatcaacatcagcagctaaaatcttttcagatttatattctagttctatacctttacctatacccataaccagtttagaaactggaacacctctactaatatcagaggtaacaatactcttcattgcatctagaatagcaatagttgccagttttggagctttcaagatgttcaaaaatgggccatatgttaatttttcattgtatctagctaaatcttcctttgataaatccttctttcctaacttttgactgacaagtaattctcttgcagttttacattctttgacttctttttcaatcagtggaatcagttgttgtaaccaatcgtgtaagtaagcaccaacaggtgaaggtaatgatttatctttaatattttcaaattctctttcccatttcaactttgcagcatctagtgttgaactttctaaaagacgttcacgaggttcagatatgttatctaaaatatcatcaaatttggcttgttgatctaatggtaatttattctttaactcaaataaatttaatgcattttctgatgacattttgagaatatcttcagtgtttatatcaagtttttcgagttcaaccaattgtatcaacttattggtaaattctccgttagaatcgatcaaacccaaaagagaatgtctaatatttttcaagtttttggaatcaactgcttttaatttttccattttattctccacaacttcgtttgaaggttctcttctttcagccttttcaggtgagctgaaatcggctggaatctctgtaattatttctctttcgccttcgttgttattgatatctctattttcatttgttgtatcgttttcctctataaaatgttctgtatcctgtgatgattcgatattggatgataatgattctttagcagatgctttgacagaatcatttgattcctcctttaatgctaaaaataagtctttgtagtttccggtaagttcttcagcatattttggtttgaaatcaactaatttcttgatgtttaaaagaccaataatatcaacatatcttaatacatcagcggttttatttgaaggttgtaaaacattatattcattgaaaatttcacttgcagctttaacatcatttgttttcttgaatgataatttaactaaccatgcatatactcttgcatcaggtaaaaaatttctatttaaggaacagacatatttcaaccaacgacgaacttcatccatggaattggtttcttcactaccccatgttttgaggaattcacagatagcatccacaaaatatggaccggaactatgtttagaagtagcaatgttttgtaacatcaaatctgctctttcgtaatcgccactctctaaacaagcttcatataatgaccaagtttgtaaaatttcgggatcgactctagttaaaactttatcatatggagttgatgtaaaaaacatttcattatctttaggtgaataatacttttcctttgtaattctggtataaacatcatctaaggttttgactttcggtatactgcttttagtttcaacagcaagaaatctaagtcctatatttctattctttgtaatcacacgagattgacgcttcaagcatgattgaatgttacgtgagttaagtagtacattcatagtgtattgtgaatgaaccctttgaataactgacagataacttgcagagttcaaagataaaaatgtggaaactgattaattactctataatatttcaatcagttgaaaaattttgaataaaaaaaaattttgatcactagagcaatttcctagtatgaatttcatctcccatacaaatttcactcactaaagtttagataattttaccgtttatttggttcaaaatttctttttccttctctcgaattctcttcggagttaaattgatgttactattgaagacttttcttataaggaaagtatatcaattaatgatgaactgaaattatcgaattactatagcaattatacagaaaaagaagtggaaaaggttgtaaaagttgaaaaggttttctacaaatggtcatcgtctatggtaagcaaattcataggttcatgagaacgttctggatctctataattttcagtttgataaagtaccattcttgaaagcatccctgcaaataagaaacaactatcttccttttcatcttgtgtttcctctgtcaaaaatgacatcaatggccaacaatggcccttgttggcctttttaacaattttaactctattagtttcaaatgcagttttacacatctcattgatctcattactttgtaattcttcatctccaaatgttattaccattcctccattgggtacaatcctattccacatttccacaagcttccaattagatggactaaattgttcttttgaaatatctgtacaataaaatgatccgtaattgttaatagttgattgtcccaaataatcattacaatgaacatcctccaaattttctgaaaaattgactatcggtgatattaaaagaacagcaaaagggtttaagtcaatatctttagaaactatcatattgtttagatcattgaatgcatcattaacaaatacattattctttattgataaatagttcaatattaaagtagctcccaatgaatcacccattaacacaattttactattaggattttcactaacaatttttattaaagactcaatgaacactttcaaacaatattccattggtgattctttacatatttcaggaaatttatttataaaaattgcagggctatcaaatccttgtaataataataaactatgtaatgttgttaaatattcaacataaaaatatggctctgaaccaaataatggaatattaggtacataaaatattattaaatcatggattttaggtctgcatgatactgtgattaaaacaccttccggatcatttacatcttcaacttgacttaactcaattatattatgagattgaataaaagctcttgatttgaaaaaatatttccaagtcaaatttgacactaatgaataagctggatttgatttttcaaaattagttaagtctcgtaaatagtgttttataacccttgtaaggacatgttgataaaaaggactattttgatccattgaatttttagcattcaatggttggacaaaacacatgaaaaatgtatcaattgaaagtcttataactatattattagtacatgatgttagtatttcttatcaaaattgttaggatagccggtacttacattgataagaagcatttattatatagaatactgcttcatctgtaggataatttgaaaataagtataatacagataggaatgaaagatataggaaatctgcaagtctatactctctcattttgtctctgtagatgggtacaaaaggaaaatatgtaaaagtaagaggaaatccataagtatgattgatacactttacaaggctcagctaagatttgagatgttgcctccttttttttccaattctttacttttttttttcttttcattattttattaaaagtttataaaagctaattatataatcatcgatattatattcttataaagttggtaaaactttttccattgcagaaatgaagatatcaacatgtttcttttcaaagataagacctggtcttaatctaacaccaacttctgcacaaccaccaacatttataccagctaatttcatcttttcaatgaattcagctctctttgaaccagatggcatatcaaaagcaaggaaacatgctttacccttacctcttaaattagtaataaattgtgggtattgtgattgtaatttttctaattgtgagtaaaagtaaagaccagtttctcttaatggttctaaaagattgttatctttaatttcatcacaaattgcagctgccataataataccctttggatcaccacaccaagtgttgaattgtctgtatggtatatttggaataaattctgggtcatggaaccagtaaccagcagattgcattttctttgagaaagtaacaagatcaggtggaggagtaatattatatctttcatggtcccacatgataccagtaccaccacaaccagcttgaacttcatcaataattaatttagcaccatatttaagggtaatatctcttaaaccttggaagaaagttgcagaagcatggttatcaccaccttcagattgaactggttcaacaataacaccagcaattggacatttccagttttggaatctttcttcaacaattgctaaacatctcttatcttcttcagcattaaattcttcattagattctaaaggatatttatatgaagggaaatcagcagttggccattggaatgatggcatatccattttatgaactggtttagatctagtaactgaacctgaagcaaataatctaccgtggaaagctctcttgaatgaaagaattgcaatttctgggttacctggagcttgatttgacatacaagtttcttcttcttcatgtagtgaaaggcttatcaaaacctctcttttttgattgatagttaaagaaaactgccttaaatgctaattcatttgcatcagcacctgataaaccattccaaactaaagtttgaccctttggagcatgttttaataaatctttttgtaattgttcaaaatcagcacctgggaaattacctaaagctggtctatcaacaatagctctaatcattttatcagaacttgcagctttaattaaattaggattattataacctaaagcaattgaagcaacttgacaataagcatctaaaagaacattaccatcaacatcgataatatagttaccttgagatttttcataatcagcaacgaaataggtacatctgttatcaaagacttcaccaagggatttgattgcatctttaccttttggacctggaatagtttcagtaacaactgaaggaccagctggttcatttgggaagcatttggatgtgtaagacatcttgttttggttagagaaagaagaaggaattaaaaatgatcatgatggttttttgatatttggggtgtatggttcaatttatagacaaatatttcaataatacagttttgaaatcagaaatgtatttacagttgatgttgaataagaatagaggcccgctaacatagcgggaactccggtataaacggcgcttagcgaatagaatttcttagcggctggaacttcctatttatattaaattagtagggcgatttcacatccgatgattgcctaaaatggacattgacgctgtcaacgggataattattaatggatattaatttatccagaagagaatgattcaccatgtcacaaaattggtgactgataacgttgaaaaatttatcgtttctctaatatttaccatagttgtcagcataaagtgacagtgatgattcacttctaagtctattaattacaatttataaaaattccaatggcattgattgtgacatgaaaattatcagttttccagccgcgggttttgacaggatggcccatcttttaagtgtgtgtcacttttctatagagaaatgatccggtattatatcacctttgtttgattgttttttttgattgtttgtgtatgtacaaggagtgtcatgaggtaataaggagaagaaaaaaataaaccgtaaaaaactagattgaaacaaaaaatgattaaaaaattaagctattcgtcaaaagtaaaaaaaaaagagttataatcgatattgatatgatgtatttatatcctgtagtaatattgcctaaggacagacttcatattctttccagagatgattattagttttcctgtaaatatgtcttctatcataaccacttcctcccagaacaacttcatcaacaagttcaacaaacatacatactacaacaaaattttcatatccagtagatgaattattaccatcaacacctctattgattgcatctaacaatttcctgctttcttcagttaatggagtaccaggtattggctttttaaaagattttttcatatttctagtaagtgcattccaaactctaagtctctcattttgccattcttcagatgttggaacattagataattcttctgtattattattaatttccattttttgacctaaatctgataatgagattgatgaatcttcgaatgttttaataaaatttggagagaataatttataattaagtggttcatgtatcgtttgtggttttaatttcttattattttgtgataaatattgactaattaatgattcattttcatcatctattgatgatgtatcacttttatttccttcattagtatcactcccaatatcgttatttataccattaatataatcattttcataagtaatatttggtgttaactcatcacttatcattcttacggtacctttaaatctatattgtttctttaatttacggaaatagaaacaagcatcaaatcttggattttttaataaatctttatatttagttgatctcttatctgtagtaaagactaacacattagttttctcttgatcaaatagaaaacctcttaaaatacatgatctagttgaaggataattatttgaatccacattggaaaaattaaataaaacgaatggtaaatcaccagcttctaattcagtttgcattgcagatgtgaatgatggattccataatgcaagtgattgtaacatgttgaatacgtttacttattataatagtatatgttgaatttattattatattctctcaactaagtggtgtatactatatatcgatatcaaatagtttaactatcttcacgaaaataatattattatgtataataattataggtactgttccttcaaaggcaaatacacaaatgtacttgatttattcactgactgatgaatatatgaacaaagaaacaaatactgctgttgttgtttgcaatttctgcacttaataatatctgttggaaaacttaattccattaaaaattgtgtgcacccactgtgagtggcctaagtgaggcaaggcaaaaaaagacggagcgaattactggaatttgttatatccgataataattcggcatattgttcaccttttgtttgatcattggtctgtattatcaatagattgataggattgaggaagtattacagagtaaacaacagtgtaattattgaccagcttctgggaatggaaataggatgtaaaagataagatatacgttaaaagtttaacaaactactgtttcactacattagcccccgaatatttctcaaaagacgactcatatattggatgtcagtaatgttttatcttcaaaaactgcagcagagaagagttagttaccttgataaagcatcagacaagataatgtctgaagaaaagccagtgaataatataagaggtaaattatgatatcactgggaaaatcactgaggagaaaattaagagcgccctgaagtgcatgagactgtctctgtatttctgtatttagcattgtagagtttgatttaattgttgtagagatatattctattaaaaaagtgtactatatcaagcaattgttaacaattgtatacataaaagttaattcttaaagctaaattgccaataaagtggtttattgtggaattttattttaaaatctactaaaaaatgttacacatacaggatttgagtccaatatttaaatcatcattaaatacacaatccaataacacaaatactaatttaaatttaaatcctaatattaatggaagtcaaaatttatctcataagtttgcaggctcaaacacttttaataatcctctcttaacaccctcttcatatactaataccaattacataaataatcattcaaatggaaataatcaatcaattgatgataaacctatgttaacttatacaaatttttataaattttgttgtttgaaaaatgttaactgttatttttatcaatttaatacaactgcaacttcaagctctaatgcctcaacttcaatctatgaagttctaagatatgaaaaattaataaaaaataaattaaagaatgattatcatatcaatgatataattacttggatagctaaaaaggaactttgcctatttcaattacaagtagataatccaaatgaagcttttgatccaaatattggttttcaatcaattaaaagatgcaatgagtaatattatcagtgaaaataaattatctctaaaattattatcagccactacatttgatgcaaataaaatatatgatacaaattccaataatttacatgtgtcacaaactcaacagcaaaaaaaatcaatgaatgttgtatatttaagttttcttaaggctgttcataaatttatattacataaaatgacaaaatctcatcttttatttgaagcatcaaatcaatctctatctattgaaatatttccatacagtggacaactgcttgcttcttcaatgatacagaaaacttcaatcaaagttcctctaaaaaattctgaaaacaattcaaagaggaagaaaatactgaaaaaacttgttccttattcaattatgaaactaaatccatcgttaaatcaaaaaaatgaactaattgtgaatattactagtttgaaaaaaatgttttatagattaacagattatattacagtatcttgtaatagtgattttgaagaacttgataaaaaatcaaaatttgctctatacattgcaccttctggtataaggtgcgtcattgctggtgctgattatcaagaatcaataactgatgaacttccagaaaatagtgaaaacttactgaacgtgttgaaaacatttaatgatattgatttgatttccaacccatccttgatcaatgacaaaagatactggttgaaaatacatccttgtggtttcaattcaagtaatagtacacctataattgctgattatttgaatgatgcaatctctactggtaagaaatatgtatattggcctcttgatttatgttttatccaacttccatctgattcgacaattgatttgaatatctctgaaccttcacagcaaaataatatttccattgatgatccattccaaattgttgatgattttcttgatatagtagatgaagtagaaatgaaacacgcttctagaaatagtagtatgcataatagtatatctccggcaaaaatggcactcggtgatacaaatataattgataaccccaaagcggaatttagatttcctgataactttaattttaatacggaaattgattccattgatcaacagttgaaacctctggctgattcagaaatggatggacttacggaaattatgaaatctaacaacgaatttgataatttattcaatgagaagaatatgaatataaactaagacctggaaaattttgacaagaattctgatgatgcttttttttcagaaacagctaagcaatgtatttgattataactctgttataccaaagtccgaatatgataatgattttgtcaatgggaatactgaaactaaatctggtttagatgctatcaatcaagttgataatgaacataaaacgaatgagcaagaaaataataatgttgctgaatccattaaacaaataaacgatattgacgcagatgaaaaaaatgtagattccaattttgatgaagattgggatgatctttttggcgaatcatttggtgaagatggatctgttgaaaaaaagaatgaaaataatgatactgttagtcaagaaacaaaccagaatgataatattgaacaagcaattgattctgcaatgaatgatttagagaatgaaataaatttggagaacaacccattatctggcggtaccgaggcaaccactaacgaagataataccaaagaagaaaaacagcagattttcaatcctgaaaaagaaagcacttcaaacagcccagttgcaagcacatctccattctatcaagatcctggtgctccttcgcctattccctttcaaatatttgctccagaagattcaccaaaggaatcgaatcctccaagtagcggttcacaaaccaaacctaatcctcttttgactccaaaggaatctaaaaaatcaatcttttcaccactaaatttcaatccattaatcgaaaaagatattgatagtaagtacagtaatggtggtaaattttttgtcagaagtttttcaactggtgtcgatgataatgattcaaaaacaaaaccgtcattaaacctaacaggtgattccaaaggtataaatcatagtgatagtctcaatacaccatcatttatttatcctggtagaaacaatgaaatgggactagaaaacttaagtaatgtcttgtctgatagtgatgaagaagatgaaattgattttcaagccgaccaaaaggatgataaaaataaaatggttggtggcgaaactgatcataaagggatgccctttaaaaatacgataaataatactaatgatttggagaaccatagtataagtgaaagtggaaaatctgataacatcgttagcaatgatgctaattcttttacctcaagaaatatttttgattttagccctttgggtattgggaaagatattgtttcaaacaacagaaacaatctgtttctggatttgcctgaaaatgataaaatcaatggaattttgtatgatttagatgacacagcaaagaatgctgatattggtgccttgtttgataatgatttgaatcaaaagtacggaaaccgtggtgatggaaccaactataatgatgatgatgatgatgatgatgatgatgatgatgaagacgacgacgacgacgacgataataatgatgattatgatgctgattatgccgaagatagctctgataaaaataaggccacaactgaagaaaattctcatgaattttataaagattctattgatcttaacaatcgtggtagaaaacagaaaaaaggaagagattctattgcagatattagtacacaattgctgggaaaagaaggaaacttggccaaaagaaggaaacttgaaacaatttttgctaacattggccaagatgctgaggatgatgagttagatttagactcaggtgaagatgaggtaactgaaggttattccaatataggatataaaagaaacgatttggaaggtgaagaacataattttgaacgtggaaatgataattataatgatgatattgtcggtctctctagctacgatattgtgagtacatatcataaggatgatataggagccaatcttgttacttctagggataatgatgaagaacttccagaaatgacaaatattgatattcctaattcctggttttatgttttacgtttgatttcccctattcaaatcccgtttaattatttaggctcaacaaatttaaccattgataaaacaaaattggactccttattaccaattcttcaagagtttgttctttactctcaaaaacaaatgaaaaattctttgttaaatatgcttattcaaaatagagaatgcccgactgttttggaagatgatttagagtacctcttatacaaaatattccctaaaataaataaggtgcattttcatgagctgattgattctcatacagaatcgaactgtgaaaaaccatttgaatgtttgtttgacattccaccaacagatactcataaacatattgacaatagccaggttaaaagtgagacagttcccaaattctttcatgataataactatgaattttctcctcttattaatgtgcctcctggtgattcccaaattttagatgatactgcaaatgatgtgatgctattggattcattcaatcaggaattccaaaaattgagtattacgaattcaataagtgatgattatatgtttagaatcaaaaccacaaacttaaacatgaaaagatttgatgaaaatattgcagtaaacaaatttgctttggagttctggaaaattttaaatcttgaaccatattctgaaaagaagattttcaaagttttattagtgattccaggtgctagttcacatttcaatgagtctgctcaacactttttgttaacgttagttcagttttataaaaattttaatttgggagaaattgagtttttaaatgatactggtattttgaatatatttactgaaactaagggacctgatgaatactggaatgcaactcttaaacaacttttatcaactgttgaggttgctcatagcgtgcactcttttgacaaaccagaaagtattttattgatgatttgtgatccatttcaagatttgcaatcgattttaaagatggcagaagtatcggaagcatttaggaaagcaattatatcaaaatcattaagtgaaacagtcgataataaaaagaagaagaggaagaagaataaaactattgctagtttacctattaaagtattctacaagtcttttgctatcgaaacattgtactcgaggaataaccaaattattgtttttacaaatgaagattatacaaaactagcatttgagctatacaataattgtccaagtaatcaaaatttaaaagatagatccaatgtttttttgattgaaaaagaagttcaaaatactgttgacttcaaactgcataaaaatccacgttcaaaatcattaactgatgatcaaatgtttttacacctctgttatgaaaggtctgttgataagaaatggtgtgttgctagttgggtcgatcaatcaggttcacttaattttacaaaatcatggtacattgatgagcaaataccgggctgtgaaggatttgagaaggttgctgatgatattatgaaaattaccatggattatgttaaaggtctatcaattgaaacatttgttgtgttaacaagattgaataatataattccagatgatgaattggcagaatggaaaaaattatctatgaaaaatactgacgttttattagtagttatgactgcagaactagaatcatctactttaatattatcaaataattctggtccaaacttttcaaagaaacagagagatgatactccgagagatgctccttatactgttgtatcaactaattcacaatctcaaacaccagcaaatatgggaaacatttctgtatacaacggagttggtagttctaaatatgaaagtcccgatgtttccatatacactcctatgtatgatgtaggactttctccactggatggtaacaatcatcaaactcaagttcctatacaaacattgcaacctctttttgaagatatcaagtcacctgatgttactgcaaagacttctatacttattgatatttctgatgaatgttatggaataatattacaagttccccaaccactttccaatcaaccaagggttcctttgaaaactgcatttttggtcaatactggagagggtgttacaaataataaaattttagaaataaatttgttgagttgtcaatccggaactagtacgacagaatttgtgaaaaaattgttgattcaatataagggtttgagttcattggctgaatattgtggaatgtctacaataataagaaattgtgggaatgttgaatacgatgatagttttgaaaatgaggaagatgacgaagatgatgaaactttggatgaaaagctattagtttctggttatactcatgaaaaagtagataaaagaaaagaaaaacaatatattcaacagcaatatacacatttttacaaaatgcagcaaagacaaaagaggaaagcgttgaaagaaagtgaaaagacgcttgaagatgaatgatttaggtcataatgttattccaattcatatgcttgcagttaggaaaatgctagactttttaactaacttaaaagttgagtaataaatttctataaaaactttgtaattagtcgtaaaaagctactaagtaactaatggtttaattgtagtacgtagattatattgcgtaccatccctctggtattttatttcactcaaaagattcagctcttcattattcaaattgctcactttcaaaaattcatgaagctggaaccttaccaaaacaaacagtttttcaaaagttatgttgattttatcattattggatgaatatttttcaaaaatttctttaaccttgttgaaggtattgaggaatatcttcaaaaaaacttgatgaatcaactgtaaatgatctagataaatagtgtaaaatctcaaatgaaagtacaaacagtatgttatcttcaaacgaactatatttatttgtagttgctgtagagtaaaacaggtagaattcctgactgtcaagtttaagtactaaagagcaaacttttttaataaatggggatgtgacagaagtagcaattgataatcttctgacatagttccaaatcaaactcaataaacgaactctagttgctattgaatctaaacaaattcctgatccttcatactgtttttcaatcagaaagggattctcagaaaaaatgtacttttggcccagtgatagatcggttgaaattattccgggtatttctactgcagattctaaatttatgaatgtgtattctgctaatgtaaccaatgcatctgtgtatgaactattatcaacattaaatggatcagtgaatgatgatatacttataagatttaaatggaaaagtgaactgagtacttcttcgttgttattacttagatataattgtaaattcatgaatcttattattgtgtttaaaaactcacgccaacgattccaagtctctaaataagattcataagaatcgattctttcaatagtttgtaagtttactggcagttttaaatgcaaagataaaataattccataatcttttctccgtttcagataaatatgacagtccaaaaaaactgttggctgaagttgttgaagtattgaacttatctgaagttgtggaaatttcaaatactgattgtagtttctcctttctcaaattgtcatcaatcataccacttttttcatccatactgtaatctaacatagaatcatcaatgttcaaaatagttgacatatttggatcacctcttttccttcttccacgttttggaagattaggttttaaaaatgaaaacaaagtattcaactttttatataaattttcaagctcttcttcaaaaatacttatatcttcatctgctaaatctatattttgagtttcaaacacgctaattaatgaatttaaataattaattgaaggaattgataaatttattaattcatctgatgatttatcctcaacatgattcagttgtgtggctgtcaatatcatcattagaatttcatctgttggatagtcaataaaggggagatgagctagtaatgttgattgtagatagtgaagtagttctaaaaatgtataatatctgtaaattttgccatgaacagtatcgagcttctcatgataattgatgcatttatttttaagaaataatgggttattttggacaatagattcacaatcagatgagtatgagtctctagctataggtgatgaagtaaaattttcaaattccgtcatttagttgagacctacgtgtattaggggtgacttgtcttcgttttgataactacatgaaattgatgtgaaagttgtgagctcaaaattacgtgttgcacaaaaaaaaaattagtatgagaaaaatttagattatactgtttgaatatagtttgaactcgttcatgaatacaaattattgatctatatgattaagtagaaatcttatttattcatatctatgcatttattgtgataattttctctcctgtataaatttcttttgtaatttgtcgttgaaacaagaggtaaaaactaaaaattttactttctctaatttttttttgaaaagagatttcacaccacctctacttgattatcatttttttcaataaaatgactgccttcaactatttttaacaaatttagaaccaagtgcaaaataaaaaataagcaaaatttgaagaaaaactaattcttttgaagagaaatttttttctaaaaaaaggttaaataaaaacaccctccaatacaaattaaatttttaaaggccacaaacattgtaaacaatgtgttaacagcgcaaaagccattaaaagcccatttttgcgcgggaggttattttattggccttaattataaataaccagatactttagaataaactgtaaactaaaatatgtaagatagtggataatacttaattacgtaatggaagtaataagtataaaataagtttactcgttggaccttttatttgtgtaatagacagcgagtagcaatgagacggttggtattaattagtagattgttctctaactaatactctgattaatgtcccctctcagaagagagttatacaaagttatacaggatatcatacttatttatattacaatattaaccattccttaatatagttaattaaactattccttatcaatcataccactccttatcataattaattcaatttcaatctaagtcattcctttcttactccgacatctccgaacctccgtatctcggaattcctatttccatcttatcatctttacgtaatcagcttacctaatcttcacgtggatattattgaacaacttgtatttattcccttacattaccccggctgttgggaaacatcgtccctgatgttaaaattaaattaaatcaaatacttaaacaatttgctcatgagcacaaatcatcttggcattatgaaataaactatgacgaagtgattccgaagccgtattaaattgatcagcagtaatagttgtagcaagtaaaggatcacaatctctccaataaacatcaaaagtattcttttcttcatcaaaaccagcaataccacacatttgattaattcttgataaaatttcagcattagttctaggtggacgacataataaatcgactggaggaacatatggacgaaaatttttaatatttaatactctatcctttttattaatcttaggtaaatcaacttcaaaagcattatcattaatttttttcaccaatctaaatggaccataataagcaggttgaattttataatatttagcaaaagcaccaaaagcatcacgatgcaataaaatataatcaccaactttataattatgaaatctatgtgatctattatgatatttttcattcaatctttgagcttgtacaatattatcttgagcttgagttaaagttaatctcatacgtctagcatattcttgagcatttggactatatctattatcatctaaataaacttgcacacatgtattcaaatatttggataagatagtattcatcatacgttgaaaagttgctggagcattagtaagaccaaaaggcataacaacccattcataatgaccataatcagtactaaaagcagtttttggaatatcttcttcttggattcttacttgataataacctgacattaaatctaatttggaataaacaacagcagattcaaacttggaaataatttcttctatatgaggtaaaggaaatctatctttaacagtgttattattcaacaatctataatcaatgcacatcctcatggttccatcttttttcttaacaaataaaacagggctattataaggactatcactaattctaataaatttttgttgtattaacttatcaacagttttggttaattcttccttttctgaataacttaaaggatattgatttctattaacttgcttattagattcaactaaaataattttatgttcgtgatttcttttaggaggaagttcatttggttctttcatagtaacaacatcattaaatttttctaaaatatcatttctgtatttattaacttcaacattattaatttctttatcaatagttttaatatcattttcttcagaggattcaacattcattgaattaatatatattagatatgaatcattatctttattattaataatagtagaaatatgtctatcatgatattcaattaaattaacattaacacttggtgttgcaaaactatctccaataaaatcatgtatatctaacttatcataatgttgtttgaaaaatggaagtcctaaaattaatttcttggtgtttgcctgcaaaactaaaaatgttcttttttctttgataggattattaaatagatcaacatcaatatctatatctagttcaccaatagcatcaacagtatcattaactaaaatagcactaattggttcaacatataatctaatcttgcttgataataacagttcatcacataaaattgtagtaatagcatctgtattggatccagtatcaataattgctgatgcggaatttttattatcaatttgtacatctatttttcgtaaattttcaatattcaaagcattaacatgtaaaatttcaggtaatgaaggaatgtttaaagttggactatttgtttcttgtttggaatcaccctttaacaatttaacttcagaggaatcacccttcttaatagtctcatctcttggaatcaccctttgagaattattaacaacagtatcaccttcttccttctcgacatttaaatgatcaacttcgggttgaatacttactggaggtgcaatataagaaaaagaactagtattattattattagatagtttattatttagtttagtaggacgagaaaaatgcatggaacgattaccaccgattggggtaaaatttgaattgtaccttttaaatggtcttttgtttctgaaaaatctttgcttattatgataaccaggtttatatttattaactctatatgggcgagaataagagcgtctaacaggagtttgatgttcgatattattgatccaaggattttttggttttgcttcttcaatatcattcaaaatagcttcagaatcttctgcataatgaatagcagcattcaaggtacgaggtttttgttgggataccatctttttcaattcaggtgttaaaccaagtaaatatcttgaaatttgaaatttagtagattcttcaaaatccaattcttgaatatattctttaaattgatcagaatatgtagagactttcattcctggaaccattttaaaagttagaatcttgtaatccatagcatgcatatcatcttcaataacaggacaaaattcttttttgaaatcacgtaaaaatctttcccaggaaatctttaaatactttggattcttctctaatttatgttctacccatttgtatgctctaccttcgagattaacaatagcttttctagcccagcttgattttgaaatacctttatcaattaaattaacgtgcaacttagataaccaagtttttgctttaagttgagcttcagtagtggagaattccttgcctttatcatcagtagaagaaccatcaaattttggaaagttagaactaagtttatcatttttagaagttttattatcatcatcagtatcagtatcggaatcagaaatatcagaatcagaattggagttatcagaatgggaattatctgaggaaaaagcatcatcaaatgaataatcagacatttcaggatcggaatggataattctaagaggtggtttaatatgtttcttctttttaataacgttctttgaatgtttggtagaatgtttctttgataattctttcttcttcttcttttcagttaattttatttccttaatttgttgctttaaagcattaatcttatctttagcagatgacatttttagttgatttaatttaattaatagatgaatataatttgatttaattaggaacacaaacactatccggtgctaccaaatgtaaactaaaatatgtaagatagtggataatacttaattacgtaatggaagtaataagtataaaataagtttactcgttggaccttttatttgtgtaatagacagcgagtagcaatgagacggttggtattaattagtagattgttctctaactaatactctgattaatgtcccctctcagaagagagttatacaaagttatacaggatatcatacttatttatattacaatattaaccattccttaatatagttaattaaactattccttatcaatcataccactccttatcataattaattcaatttcaatctaagtcattcctttcttactccgacatctccgaacctccgtatctcggaattcctatttccatcttatcatctttacgtaatcagcttacctaatcttcacgtggatattattgaacaacttgtatttattcccttacaaaaacataattggtcggatggtctagttggttatggcatatgcttaacacgcataacgtccccagttcgatcctgggttcgatcaattgaactttatttttttatccttttaatttttttaagtctttaattaaattatattagacagttcgctcactacacgttaaataattttgacttgtaatactagccacagtttttttttatttatactatgagtaaataaatatcaatatttttttacttctggggaggtttttggattttgatgtaatcattatttcaattttgtttgttacttatttatttttattatttttattttattttatactattttatcttatcttatctgataacactttatttcaactgaacttctattgttttccttttctgtcaatcttttaggtaccggctttattttgttcaattgtatattatttatttatattcgatatatccaaatacctatattatcgattcttcaatcatggatgccgctcaacaatcgtttaattctttactacaatcttatatatctcaacctcctcaaatggatcaatcaattgatagaagacgtatagaagtactgttacaaataaattcagtacttttatacaagtgtattatgcttcaacaatttgtattgaatcaacaaaatgtttcagctcctgattataatgaaaaaaaagatttatatcaaaattttttaagaagaattcattataatttaacgtgtcttgcatcaattaatgatatttattcaaatagtacagctcaaaagaaaaattatactctacctcaaatcgtatttccaccttctgaatgtccagaattatttgatcattataaattattgaatcaactttatccagaagcaatgccatttttccaaaagaaaatgttattagcaaaacaacacgctcaacagacacaagcacaagcacaagcacaagcacaagcacaggcacaagcacaggcacaagcacaggcacaagcacaggcacaagcacaggcacaagcacaggcacaagcacaggcacaagcacaagcacaagcacaagcacaagcacaagcccaagcacaagcccaagcccaagctcaggcacaagctcaggcacaagcacaggcacaggcgcaagcccaagcacaggcacaagcacaggcacaggcacaggcacaagctcaacagatgcaacatatgaagcaaatgcaacaaatgcagcaaatgcaacagatgcaacagatgaaacaaatgcaacagatgcaacaaatgcaacagatgaagcaaatgcaacaattacaacaactgcaacaaattcagaattcaaatattggaacaccagattcaaatatgagtaattcattacatttatcaaataataatggtaattcaaattctaatactaattcaaatccaacaccaatgaatatgaataaattaccaatggatcaatcaaataatagatttacaaatacaggtaatatacaacaatctggattgaattctaatttcaatcataattcaccaatggatcctagttttgtgaatttccaacaacaacaacaacaacaacaacaacagcaacagcaacaacaacagcaatcaccacaacagcaattgcaggcgcaatcacaacaacgtggatatatgaatgataattacaacaatttcgaagttgctagaagatcatccaacaacactcaaggaaatacacctcaaataactccacatgcccttttgaatcaaaataccattacaccaggacaacaaactcaaaatacacaggagttttcaaatgttatgagtcctgaacaaattcttgctagagtttcttccggccaatcccaacaaccaatatacaatggacaaacagatactcaatcacagatattaccacctcattctccacagcaacagtttaactcaccatatggttcaaataatctaaacaattcaaatagtaataatcaatttcaatcttactctcaacaaggtagtttcatgagtggctggtgattatagactttaacaatcatatatattaatatacacacaattttcacattcctagattaatttaatacctgaattatatagacatcttacgaattcatattttttttagcttatatacactgtaacattaattgcatacgatctatatcagtactttaaaaacgtataaacttttgaaccttaaagttatatgtgtgtcactcatgatgaggcgcatgaaaaattatagctaatcattaatcgattctacacgattccctgtgcaataacctccttttttcttcaagaagagcaataatgggacgacgtaaaagtggacttgaactaacagcatttaatccgctgttttatgaatcagatattggtaaaaattcatataatatacctgatgaatatgaatcaatacttatagatatttatacccaacgtacggcagaaataccagatataattagtgatcaaataaataatatacttcaagagaatttaaattaccaaatgagatattaccaacaaaggaagaacttaagaagtggacaattcgatggtacaaatatattggattttgaaaaatggttatataatggatatttttggatgatattgagtgaaaatattgatgatgttgatattatttggaatgatttatggggaaatttaaacaataatgataatatggacaatatcagaacaaagaaattatatctctctgatattaataaattaaataatattggtaaacttgaagctaatgcgatcggtatgcttcatacagctggtaatggtaaattatatgttacatacgttgacttttttatattattgggaagacttgggatattacaaatttctaattaaacaactttttagtatatcaaagtgtaaataaataagtatatgagtgaatggatatttgtaaattagttaactataaaaagaattgtcttatacataaaaaaattataagatatgtttagacttgaaatagtttctaagataatgaatttgataaacaccaactgagactaagaggaaaagacctgcaataaagaaatttctgactcttctattagtactttcatttgtatttcttaaacgttgttctctactaattaaatattctaattcattaataatttcatctaacatttcatcaacttttcttaattgaacttcagaaggttttagtttttcagcactttgaattgcattccaatctctagcatttgcaccagcttcaacttcaagttcaatttcacgtgataattgacgaccatttgcactataaccaggttgaagacgatttgtaaagcaaatatcaaaacttgaagtttcatgtgcactaaatgcaattttaacattacctgcaatatcatctttacgacgatattcatcaccatctgcatttgtaatttttaatgataaaatttgtccatcaccaactctaccacttgaattaacctgtaaccactactaattgcccatcagatacaaattcacgaacacattgaggctcattgttatgagacattgcaggaatttcaaaacgtaatgcccatgctgcattcatgtatacaaatagtaacgctaataaggtataagcacgcattccaaccattgtaattgtttaaataaagaagaaagaagaagattgtcaatgacacggtattaaaattatatctgatgcatgaaaattataataaacacagcactctctcttttttctttgtcaaaaattggacaaaaaacacgtcgccaaaaaatttcagtactggaacccattttgtcatagtttttgctacaaagtctctgtatcttcgatatatacagccaaagatgttcaacaagttatattaaataaaaatgtactttattttgattttagttttatgtgatataaaataaaaaattatagttttactacttacatatcttcttctttcttaactggtgttggtgcatcccaatctccaactgttggtgtaacaccccaatctgcatctgcatcagcaccaccatttccagaattcttgtaaactgatgctccaccccaagtactaccacctccattagcatattcactacgaccaccatcattaccccatctattattatttctattacttgaccaacttggagttttaccacctgctgtattactacttgaccagctcggagttttaccaccagatcctgcacttgaccaagctggtgttttacctcctgccccagcacttgaccaagatggagttttaccacctgtagcgtcccaacctggagttttaccaccagctccggcacttgaccaacttggggttttaccacctgtagcatcccaacctggagtctttcctccagcatttccacttgaccaacttggagttttaccaccagttgaagttatactattcataccattatttggtggatatttattattataaggcaatctttgattattaaaactaccatttggccctgttggtcccgatggtgggaatggacgtgatctattactatgatgatttttacctctaaaattttccagaaattgttcatgtggaacataattaccaggtcttaattcaaataataaatcagatttactaattggtataatttttgcaggattatgcatttcaactcttgcaacatcaccatttgcatctttgataataccctttttacccttatacggaccttttctaacactaacatgttgactaatagttatatcacgtcccccaaatcttgattgatttattgttgctaaatttggtggttccatcattctatttggattacgatcaggaactttaaatgatgaagcaattgaacctttattagcaattgtttgaacagaatttgaatcagtaacaaaaataccagtgttttcataaacattctttgaatgtaagaataaataagatttgtaaatatgtaaaatattaccttgtctcttttcaccatttgattctctaacaacatcaccaactttaatttctaaaccatttctatcagttgtcttttcagtcattttattaatacttaacactgacataatattttttggttctaaatttaaaactctaccatctgtacataaaattgtaaaaatttccttttcaactttaataatcataccaattttattcgaacttaaattaaccatttgatgtaattcaaatctaccaacttttgaagcagttgttgatgaatcaacagatctaactaaataatttggaaaaactgtaatatcttttttagtttgatctgaaactaatgtaacttgattatcagtaacatcaacaattaaaccactttcatttgtatgaacaccattgataattgtaacatgatcaccttgtaagaaaatttttcttaatgaagtagttggaacttcaacaactgtattatttaattttaaactattttcattaccttctaataaaattctagcaattttagcatcagcaattgttaaaactttacctttcattttagattgttcaccactaataatttcaactctatcatttggttggaaagtaacttgtttactatcatcaatttttaaagttgaagcaattgaatgtaaatcaataccatcagtatcattatttgaatcaaataatgttaattcatgtaaagttggtttgatattttgtatttgtagttgagtaattttaatatccttataaaggaaaccattaatatattcttcatttctgtaaatgaaataatttctatcctttttagcagttgttaaatgttgataatcatattgttgagcttcaatatcagagaataatctttggggaggtctaatttttgatgaattataattaattgatttctttttacctgttacaggatcaataactgtattattacttgatctaccataatctaatcttggaactaatttaactctaacttccatatcagtttcagctaaattatcaacaatacctaaatcacctttatatctaccagttttaatacgaacataagaaccaggtttcaaagtactttcttgagatctaccaggtcttaataaatcaggatattcttcaattggaactaaaactttaccaacattattataaataccaggtaaattagctaaaatatgattaacggcatccattcttcttgcttcaatatagatataaccagtgaaattatctctttggaaaactgagaaaacttcttgggtatctttcatattaaccattctagcataaatttgtctgactaattctttttctttaccatttctaactctaacaccccagattaaaggatcatcaatagaaggtaataataaacgttgagaaatattttgggatgaacccatatatcttgaagaagatgaacgaccatatctagctttaaattgatcagctaaaacttgagcatcttgttcagccagtttttctcttgatctatctaattttctatgagatcttgaagcttcattttcagcattttcaattgtttgatcatcagctaaaaattcttgacgtaaaagcagatcatcctcatcttcttcatcttcttcatcatcatcaacttctgcttcaacatctaagaatcgattacctgcagttttcttcttctttcttctaacagtatcatcttcatcatcttcatcctcttcgtcatcatcatcatcatcatcatcctcttcctcttcttcttcttcttcttcctcatcgtcttcatcttcatcttttttaacaatgcttttagtttcatcaagagtatcagtatcatcttcagccttgactaaaggaatatcaacatcttcaattgtaactttatcatcatcatcagattttttaacataagtttcagtaaaatcaccatcgtcatcttcatcgtcatcatcttcatcatctaaaatatcagtatattctgatttaataacaggtttaatatctgattgagatttaatatcagttacatcttcaaaatcatcatctacaacttcactagtgttgttattactagcagcatcagctttagatgaagaattatcaataactgaggaagatgaatcaatttcagtatttgtattattattaacaatatggttcggagattgagacatattattgatgattacagagcattaacttaaaatttattcgaaataaagacaagttacaaaataatatattacaatacttatactatatttacagcatgacccaaataaagttaataaacaaacaatagtgaagaaaagacgaaaagaaatttgcaagtgaaaaaaaagagaggccaaatagagcctgagtcctcactctgagcatttatttgccttcctgtattaattaaattagtaaaatattaatatacgcattggggagggtaactattttattacgtaagtattggttattggttatatatcggtatatagtgtctagtatagtatagttatatgtacaagtgatatttcaatatattctatttctttttccataagaaagcacctcttgaaaaatctaatggttttggttgttcacctttacgttttttactttcagtgaaaataacgtgacgttgaacaactggatcataacgtacttgagtaatttcctttgcagttcttggaactaataaagttcttctatatcctgtctttgcagatgaaacaagttgtacaatagttgttctagcctttgcctttgccattatgtgtgtatgtatataattgtgtgtatataagacctatcaacagaaagagcagtaacactaatttgatgttcttcaaaatttgaaaaattgaaaaaaatcatgcactccactaaaattaaacactgcgccacatctgttattaacacaccaccgcttactgcgccaccagtactataaaataaatttccggagttggagttcccctcaaaaagacccttgaacatgtccctagaagtgggcttatcaacgtttttcattttatttattagatgtatttaaatagagataccgccttaaagtatataatttactattattttgaaaattgtataaagaaatcacaaaattagaaactaaaataaaaatggatctctatattgtatcaccaaatcttaaaattcaaaattgtgaagattgtccttctcatgatgttttagtttcagctaaacataaatatttatgtttaattcataaatctcaatcaatgtatgattcattagttgaaaaacctgattggtgtaaaccacgagataatattaatgaaaaaaattcaatgccaccattagtttcaattattttaaataatgatgatatcccatcaacttcaaatgtaccttcaaattcttcttcaaaatcttttaataatgatttcaatagattgaatataccaaaatcattttttgaaaataataataataataataataaaattattgataagaatttaattgatcaattaactttaaaatatatttacattttaacagatttatcatatcttaaatataaatatcttaaatctcatattaaaattaataatttaattaaatcaaattttacaaataaagttgtttcagaaaaggaagaattagatgcaattaatcgaataagtttagaaactgaaaaatttcatggattagaatttattataatgcgtttggttcatttacaaaaagttttccaatcacattttcaacctttaattgatcaaatacaagtttgtaatattaaagaaaagaaagaagaagcaaaagcaaaagaaatagaaggaaatgctagtaactaaactaacacaatagcatcatagaataaattttcgcgtcaaaatttaaattccaaataaacttccccctttcatcgaattattttgattttgattttgattttgattttgattttgatccaattgtttttctattttgctttctcttcagtatttcatcttcaattttacttatttaacttctttttcttatataacattgctttctaatcatccatttctatgcatatttaaataccccccctttttcctttttaattaatactcttagcataatcataaatagcaaataataaataataagcaattaataataaacaattaataataacaattaatatactttaaatgaataaagaaaatagaaaccccacgtcattcgctcgaaaagcagctaaaactgcaattatacgctctaataaaaatccagaaaatgtactaaataataatcaaaacaacaacaataataataataataaacaattacaaaataatcaaattgacaaagttgtagaatctgtcgttaatgcaactaaaagattatctcaacaatcaaatcattctaactcaagtaaaatgaaagtagagaatagagttggtccctggagattaggtagaactttaggtaaaggttcaacaggtcgtgttagattagctaaacatacagttactggtcaattagctgctatcaaaattgtacctaaaaatataatagattttaatatagataatgatgataataataataatagtaataacaatgaaaataatcctaattcaaagaagaaaaaggccaagaagccaaaagttgatgagaatggtttaccttatggaattgaaagagaaataattataatgaagttaatttctcatccaaatataatggctttatatgatgtttgggaaaataaaaatgaattatatttagttttagaatacgttgaaggtggtgaattatttgattttttaattaataatggtaaattaaatgaatctgatgctgttaaatattttagaatgataataaatggtgtatcatattgtcataaatttaatatttgtcatagagatttgaaacctgaaaatatattattagataaaaatggtaaaattaaaatagctgatttcggtatggccgctttagaaactcaacaaaaattacttgaaacttcttgtggttctcctcattatgcttcacctgaaattgttgctggtaaaaattatcatggttcaccgagtgatgtttggtcttgtggtgttatattatttgctttattaacaggtcatttaccattcgatgatccaaatatacgtaaattattacttaaagttcaaacaggtaaatttcatatgccttcaaatttatcaaatgatgcaagagacttaatttggtcaatgttaagaattaatccgaatgaaagaattaaaattgaagatatttctaatcatccattaatgctaaaatatcccgatgattcaattaataatgaattgaagataaattagatcatttagatatttctgttccagtatccaaaatcgattttgatattttaaataatttgaaaactttatggaatggagtacctgaatctcatataataaaaatgttacaaaataatcataaaaatccagaaaaaatgttttactatttattagaaaattataaattaactcatgctaatgaatcaaatttaccagatttaaaacactcaatttctaagacaactctgagagtgagtagttataccaataataataacacatcatctgataattcaactaataattcaaatagaaattcttcaagaactacaaaaccattaccaaattctacaagtactgttataactacaatttatgataaagatggtgaagttttgaaatctgaaagtcaagagataaaaccaataaatactttgaaaaagaagaaatcatcaaatactaatctaagaattgttgcatctacttcgtataataaatctatctcatttcaaaagattagacgtgatacatctgcatcaacattatcaattgttaatatgtcaagaaatttaagtatattaccagattctaaccattatttaccaagagatagacaatcaagtgtaaaacttaataaacatatagatcaaatatcaccttcaaaatcatatactatgaatccgaaagatttacctgaattactagatcttaatgacttataaatatttagttaatagtatttttgattcaaaatattcaaataaagatttaacaaataataaaacaaatgatgataaaccggataataagaaattaaaggaaaaaagtagagttgaagatgatataattatacttgatattgctgattcaacggatgatccaaccgataattcaacttcaatggatacttcttatatttcatccagagtagatacaactgcagaagataccgcaccaatgagcaaattagagaaattaagaaatgatcttggaattacaaataataatccacaaaataattacagaaatttttcaagtttaaaatccgttagatcatcatcaacaagaagacttaatacgtttttacaagaggaatataaaaatgttaaacttaatgattttagctcaattcatgcaaacagtactgtaaatactcataggacacaaccatctgttacatattcacataaaacacaaaaatcaataacattatcaaattatagtttacattcagcagttgaagttaaaatgatgtcaccaacgttagaggaactgagacaaatgaatgaaggtagagtatttgaagatgctgatgaatctaaaaagaatttgaatttgattagtactgaaaatttttcaactattcataaaaatattattccaaatgtaaatataaatgaaaataggaaatctgaaattagaaattcattattaactgaatctacaaatgatgttgttcagattgaacccaaaatcaatgaacatacatcaaatgataccaatgaacctgcaaattcagtgtttgcagatgctgaagaatacccaaatttaacttcagaattacaatatacttttgacacagaaattactggttcattatacacctcattagaggaacaacctcatgaatctgaaaataaatcaggagagaaattagttaagggaaatgataaaggtattagattatcaatgaaaccagcaatttgcgactgaggctgataagactaaatatattagacatgcacctacatctccaaatccacatccttttagagctgctataaacgaaaatcttaatgttgttgattgtactgttggatcacgaaaaacaaaccaataatgcagaaccaaaattacaaactaacaattatgttgaaagtcaacatgttaaacctgctaaaaaaaccaattggttcaaaaaggtttttgcagcattgaacaaaatgtctcaaagaatctaataaacaaatcaatgataacactaagaagaataaaaatagatcatcatcaatcccaaataaaagtaaggcacaaagagcatcaacatttttcaataatatttcatcattaaaattcaatagggctacttataaaggtaatactaattcattgttcaatactgaatatttaattgatagtgatatagttacaaaggatgcattagttgagaaaattcatgaagattcaagaacacaaatactcaaattagttaaaacagaatctgcaccatcaggtcataattatattttcgaagtatcaaatcttgatactaaatttgcagttaatattattgaaaaagttggatcagaatatggatttggaggatgttacattaagttagttaagttgaaaggtaataaaaaatcttttgattattggtgcactatcattaataatattattttggaactggaaaaaatggaacaattatagacttttcttgaataaataaacgtactttaaactttaaaacactcatgtaatataatacttctagaaattaatattaatgttgtattgtaaaatggatatgattaaggtattagtcgattatagtaaaccctaatctgtgacagacattataccgggatgacttaatagttgagttcgtgtcgtaacgtttttctttctatttcttcttgttaacattgcggagtttgtttaccgttccgatgaaagtccggaaaaaagtttgcttttctggcaccattttctgtgtactgaaaacgtcattgcaatatatttacctgcttggtgactacaatttatcaattactatagtgaggaattcggtttatatttgctatcctaggcaaccacttccttgcaaacaacatgtggggtttaccttttgtgactgtaactatattttatctaatgtaacgttttgttggcctaggcatagggtaatttaatagatgacctagccttttgaacaaaaaggattgcccacattgatataaatttgagaactcaaatgttaagccgcacaagttttgttttgattacagccgttcagaaagaaattttggaaaaccgttgaaagtttaactaatgcccttttttcaaattaggaaaaattcggggttagcatttttaagagtttttgcctatttaggcaaaacttcatatattttttgatcaatttttttataaatccgacataattagttattgtgtccctaggaagatgtaattatagtttgtaatttgaaacaacccaagtttaattgtaagagtttcagatttcaaaattttacttaaatttgcttatggcaataataaattttgtgtgaaaatccccgatgttacatatacacataatggatttcagttcaaactttctcttatcttatcggctaccaattaaattgggagcttatttgcttggttatgactttgttatcagcaaatcaatatttgacagcaaaatcataagaaggattgttacttcaacaagttgtaatttgtaaactccgaattttatacgctcttacatgtccatagattgaatgataaatactcgattatttataaagaaaatctattcgaaattattggcaaaatatacggtaaaatgccttcttatttgtattgtgtataaaggttgtgttacgataaaggtaatgaaatattgatcttattaccatgatttctctaataggtttggtgtcactaacaatttgttttgcgcaatatattacaaacttaacattattttaatatatagctcatcgcaaaagttttcaaaatccactaaacgattactttattcgacaatttataggggataattgaaagcttcttctaatgtttgaccgttaaaacaggaactttaaaagtaaaaagtaacattaattcctttttcacatagaaattatttaattggcatttagtgtgcggcttataaagaatattttttacgttcctttaaattctgcggcgtattttttcaacggtattttcacgtttcttttttttgatttcttgatttctgatttaccttataccagctgttatcctttttttttgactttcctatcgatgatgctgtttttcttagctctttccttagactcttttcgttttttttccctttttttgctattcaccgatcaatcattcaattgatagtatacctcaaggttcatatactataatctacaacacacttacacaactacttaatcatccgattattatatctaacatttgaaggttattattatcaacttataccatctatatatccccatccatacatcttagatctgaatttgcttacattttttttcaacactttttaaataatctgctcaataaatattaaaacaatcattataaataaaataaaccatggaaataccgaccgttagaattgtcgttgccggagatctaggaacagggaaatcaagcttgatcaatttttatgttcactccatttttgctactgaatttgattcaactattgaagtcacacacaaaaagcaagttaatatcaatgataaactttacaatatagaagttgttgatacagttgacaatgaatttcaaaatgaagaacaaagaaaactattatatcaaacttgtgatgttattattttaacttatgctattgatgatatggaaagtttcaaaaatttatatctgagatatgcaaatctgccaattaacgaagaagatggtgaaaaaaagcttacatatctgaatggtagaataaaatgtttacctccaataattgttgttggtaataaaactgatttagaaatggcgagacaagttgattttcatgctgctaataaagcatccaaagagttaaacatacctacctttatgcaatgtagtgcagcaacaaactacaacgttgatgaactatttgaaactgctattgaagctggatataaatattctcaacttgatcatgatatgactcatatatatgctgaggaggaagatagtcagatgagaagttcagatagaagaaataattctagttgtagctcattagcttcaagacaaactatgtctaataatcaaaactcttcaaataatagtagcagtagccctgagggtacttttcctagaaatcaaaaaggtggcagaaagattcaaagaattcaatcaatcaatgaagatgatgccgttatatctaacaacatagaaaattcattagaacaaaatacacaagctcaaacattaaccaccaaagtttcaaatacaaaaccaaaacaaacctaacatgtttctaaagcagaaactaaaccaactaaacattccgattattgcttgcaccattatgtgatgcattgtatattgtacaatattagatttttttgtaataagtgttgatttatttttttgctaaagctagcattatttttcatttttatacaattttttgttgtgatcactgttttaatcaacttttagacaaagcaatcaatctttaaagggtatcacacatccacttattatagtatatagttcaagaagtttatgttaaatgatttgtttcattgtgcttccacttctaccatttttatagactcgattatatattacatttgagttattgtgctatatcaccacttctttatagacttaatttattaacttgcaattttttttacattaaatttttcccaacaaaatattaacacgaaagcaataataagttacttacatccaatctggctttattaacttcattcgccttaaattacattattaatatgatacacgagaatgagctattgaaccgtgatagagaacaacgtgataaattacgtcgtgctgatgaaagattacgtgaacgtcgtatgcgtgaagaagttaataataattcaaatagtaataataataataaggaaaaagatttttcaaaaccaaatactcattcgtgtacgtacatggattgatagatcaggttcacttaaagttgaagcagaatttttaggtgttcaacaaggtaaaattcatttacataaaattaatggagttaaaattgctgttgcatgtaataaattatcaactgaagatttagaatatgttgaaaaaataactggtacttcattagataaatataaatcaaaatcaaacccatcatcatcaacaacagcaacaacagcaacaacaacaacaaatgtaacaacggcaactccaacaacagcagcatctgaaattaaagaatcatttgtttatttaatggtgtttaataccagtgtttaaacatacctaacaatgtgctatgatgtatgtattttcttatttaattcattattcattttctttaagacaaatagaatttgtttcaattattggcaatctacattctagctcaatttaaattaatttttacttccagtttgattgtatttggtaatgaagttttttcaatattttctgaagtttagataattttattttgttatgtatatttgcacttgaaaatgtgttcaataaaggaggtcaatcaagcttataaatcacgtttaagttaccaagctggtgatgtttaataactaaaatcaaataatactattagaagtctaaaatgttgagaatatcttgcggtctaacaaacatgaattcaaattcaacggtgcttccaacagtaatatttacaggatctatttttagagacagacatagtaccttatactcaatactctaaattatgtatctttgaaaggttttattcctgaaaaaagaattagttgtggctaatttttaaagaatacgtaaattttgaaacaatcgaaaaaactacataaatattcaatgccaccgttaatggttgtcaaagtaatttataatcaagtcaacgtttgctcccacaaattgatacttcccatgaaaaaaagaaatttgccgtgacctgaattatgcgcggttcctggttgcatctcaaaaaatgaacgtttttcagttgagagaatctttcttccccagtatcccaaaataatgaattaatattgggaattttttacaggctaacgaaaaaggttgggaacttaatgtccttacatgaaaaattaaattacatacatcagttggtatatctaaaattgataagatgttaatattagtaaattcttagtatcatgagtaagttttgtaacatagtacttgaaactctttgaaattttcataattttcataattttcataattttcatattattatgggaccactttgagattatgcaacaaactcatataaaaagtaaactgcttaaacttcacactaatcagtttacttaatagaggatattgaacggatttatcaacacttatagttaacaaactaaatgtgaccgacatgtttatgtaatcaattatctcggttaatgacggcatgcaacaaaattattttaaaaaatgtttcggtaaagcacggttaattatggttattaatggacttttttatctttaagccttttgtagccgaagtttgtaaaatgatgaagaagtatctttgtgttatataaaaagctatacattccccccttttattattattgaatctagagtatacttgttataattatcttaacactgcattactcttccaattctgttgaatttaagttcaaactttgaattaaactttaatttcattcacttattaatttattaactaaccctcactcagtatattagaaaccctttccactttgttcgggcaaacggatatcccacttatattttacaaaagtgccggcggtagggttaatttttgaattccgatttccttttttggtgtttcggcaatgctcgcaaatttattttttcttattttacaataagttaattatgaatttcggaagtgttgcgggtctgtaaacccgtttattattacattgtagctgtaatttacgtattataaactaccaaattacactgtaaaaacgactctttagctagaaatatgtatttgcaatgactcttctaaaacaaaaaatgaatcaaactacaatagttcttatcagtgcccaatttccccagacttgatattggaaaaaaagataaacaagtcttaatctaagggacagaatagagataacctcagctttctccgttggcggcatgaaaaatttgtcaaattattttgcagtcattttcaataatctattttttgtggagagaatttgtgaatgattcataatttacaattgagtaaaactcccttaaagtaggtatttaagtgcttttattcctgtatcattgtattttggtacatctgctagtatttctatctttctattctattttgttttatattttaaatctttactcttattccaattcccattgaatatataatataaattacacaaatgagttctaaagctagtatagagctaacttcaataaaggcagattcaagctctgcagacatagagtctgctactccaattaatgatctacaactgccgttaagtgaaaaaaatgcaaaagttgaacaacttgctcaagaacataatattaaccataaaaaattaatgtggaagatcgacctttgtgttgttcctccattctgtttattatactttttagctttcttagatagagttaacatatcaaatgccaaaatttatggtatggaagaaagtttgcatttaacgagtaatcaatattcagttgctttaaccgttttctttgttccttatattgtctttgaagttttatcaaattatatgttgaagtcaattaaacctcatatgtggttatctgcaatgattcttttatttggtgttgttacaatttgtatggcttattcaagaaattatggtggtatagttacttgtagattgtttttgggtatttttgaagctggttctttcccatcaattttttacattatggctaacttttattcatcagcagagtcacaaagaagattctcattctttttcagttgtacatgtttagcaggtggttgtgcaggtgctttagcttatagaattcatgatttagatggcacacacggtttaaaatcatggcaatggatttacataattgaaggttcatttactgcaggtttagctatattattatattttattgttccagattttccagaaaactgtaggttcttgaatgaaaatgaaagatcattcattaagaagaagttggaagtttattcaggtaattcaggttttgaaattaaacaaacttggaaagatgttggtaaagttatgaaagatcctgttatttatatttgtgctatatgttacttcagtttcattgttcctgcttattcttatgctttttttgctccaactattattagggatatgggttacgttgccatggaagctcaaagtcattcaatttatccatggttagcatcaatgggtttcagtattatggttgcatatatctctgactacctctacattagaataccatttgcaattttagcttgtttggtttctatttgtggtttcggtatggtaattggtgctcaacacgaacctcttgttagatacggtggttgttttatgcttgcggcaggtttatacactgctatgccaatcttaatttgttgggtttcattaaatttctcaggtcatacaagaaaaagtgtcggtactgctttcatcattggttttggtaatattggtggtattgttgcatctttcattttccctaattcagatgctccaagataccttaaaggttttggaatatgtttagcttttgttttactagcattaataatgtgtttagtatactgtggttacttagcatggttaaacaaaaagaaacagacaccagaatatagagctgcttgggaacaattagattcaagagaacaaattatgaaaggtgatctgaacccagatttcaaatacttatactagttacatttgcaataattaactttttatcttttttactttcttttatgatgtactttttttatatagactaattaacctaattttcacgatacactgaaaaagctcagtttcaaaacgatttttaaactttaaaagaaattaaacagagctgggacacaaattaagctgataaatgcattaaccaagtctttaaaaattcattacgtcaattttttaacaaatgatttttaaacttagtatggattgttccttaactttatttgagaaaccttctctcaaaaatgataaaacatattattaatttgccgcattaggaaatttttacaaaccagctataattttttttttgattttcccgtcagcttgttcctgggaatttggatattggattattggatattttgagccaactgacacaaattgtttcggaatctaagtttcttgattcaaacaatagtaatcttcctttgatttgtttcattcctttcaatcatttgtgcaattaataaaaaattagtttgcaaatcaacttctgggaagttataagataagtttcgattcttaaaatagctttaaagatagtgcaaaagacatcaaaatgtctaaattacatatcaaaactagagcaacatttagttggggaggagatccaaggtccaatcaattgggttttatggaaggtgatgttattgacattctgaaagtggtgaacgatagtgtctattttggagaatcacagagaactaaattgaaaggattttttccaagtgattatgttgataatgaacctataatggacgaattgaataaaacaaataatagttctactccctccaccccgacttctatcggttccaaaaataatagttctaattctctattcactttacgtaaaaaagatacgatccataattctaattcaaacacagacatttccacatcaatagataacgatcgttcaaaaagtccacaaagttcagagatcaaaaacccagaattgaaattatccaaaaaattcacatcatcatatgttcaacaactcttggattcttcaacgttgagtacagatacaaatacttcatcaacatttggtcattctgattttagtgcaacttcagctggttcttttatgcgccataaggatgactatgaatcaaagttacataatttaatgaattctaatattcagtacaatacttcaacgcgtaatgcactaaatgatataatagagaagaatgaaaagaagaaatcatcatcaaatttattcaaaaactttttagggtctagaattgatgaaggtccaagttttgatgatcgaatatatctttcatctgttgaaaaaatgagtcaaatgaacataaatgatgcatcaatgtatgaacatcaccagtatattagtccagcacaccaacatagtcaacaatctttaaatttctcagatgctgaaagaacaaaaacaatttcaggtcacgacagggcaaaaagaaaggaaagagttttaggcgaacaacctgatctgattttaaagccacaagaatgcattaatcatgttaattatgaagaaagagatgcatcggctttaatgaatagaagtgcaagctataatttagatagaatggatttcagtaaagtagatcgttacattgataaaattgagcacaatccatatgatagtccacaaaaattcaccaaggagacaattttaagaaagttcaaaagagaatctgaagtgtgccgtgctatttacaattacttgacgaaaaactttagtttagttactagaccagatgaaatcatcagtactaagagaatgtttgagtctcataaattaacagaaataatgcactcaaaaacttgtacacctcaccaactaacgtggatgttttatttgatggcagatacagcaggtttggaagtagaaattatcttaggttatctaaaacacccatttgttctgaatgaaacgatcactgatgctaaaaaaagattgataataaatcattcttggattagtattaaagttgatggagaatatagatttgttgatgtttctttaggtaatccaacaaacgaatttagcaatgaatattctgaaatatgggatactagctctacaaggaagttttattttctagcaagaccttttcatttgattcatactcatagtcccagatttattgatcaacaacatattgttccaccaattgatattgttgcacaattatcattaccaccactttatccacattcaatgattgaaggtatttctttacataaattcaatactagtttatttcatctaaaagatcttgaactatatgattttgaacttgaagttccagaagattatattgttcaaggtaaatttaaaccatatgacgaaggatataacactgaagattcctttgttcaattttattatagaaacaataaaagaatagcagcacttccaaggtataatgtcaaagaattgtccagttggttttgtttatgttactggtaaaagtgagttttcaagaaaatggaatttactgatgagtattccttgcttccatcaaggtaaatggaaacctttacaatgggttaaaaaagtaccaggattgaatggagttgatgtttatttaaaagaaccaaaaataaataatcttaaaatgggtgagcaaaagtttgatattagagtttttggaaaggctgattgggttaaagaagttaaaaaattctatcatggtgttttaaaattgggactattttctcctagtaaagatatcatagaacttgatatttatgaaaacaaatatacaggcaaaattaatttaaatcaacctggtatatggaggttaggtgtattagatgtaaagcaaagaagatggaaaattatatctgagtggaatattgaatgatgaaaaaagcattataatgaagttagaagtataaagtttatagacatatatctttaataaatagtcaaataattaataattaatctcgaaaagaaacattataagtaaaaatagttaaaaaagagaaagctaaaataaataaagatgaaagtaaactgaaaggaaattatttcaaaagtaatacatgtaactttttattgaagtattaagttcatgaaatatcttccaagctatcttccatggcttctcgtatatcatcttcaatgagatgatcatagttaggaggaacttccagcgttcttaaagtaacttcatcagcatccagttcatcatccgtaaattctgcaggttgattaagctcattatttttcacaacttcctcaaactctggtagttctatatcttcaaaatcacttgcatctagtaatacatcattattgaatctttgatacaacggtggtggcatttgttcgcctcttagaggtcctaaagcccattttttaacattggcttcaatgaaaacatatcccatttgtccaaaattaacatcaattctacacgggtttatacttccaatagttggaaataattgaacattctttggcattcttacatgtccaccaacttttgattctgataattttttaccatttctggtaaaaaatacaactcttgtttgtcttctgaaacctattccaacaacatcacccttttcaagttgtgggaatgcattatatcccagtttaaactccgtcaaggggaatggataattatgtcttctatctccaactgaatcatatgcaacactatgtatgtaacgccctggtaagataaatgaaggataagggtatgttgataatcctaatgatataagtgtattattcttgaattcttcgggtatttgaaagattttgaactcaatataatagacatcttttgtatttggtatgggtaaatttgattgaattgatattggtatattttttgttttaaaagtaatttccgttttattttcaatagtgattgaatgtctattttctggcgtttctataaattcccaagcgtgtacacctttttctttaatcatatcaagttgccagtttgctaaattcagtttagcaaatccatttaattttatatattcctttgcctgaaagtaaatttcttgatcatctggagataatactgtcagtgctgtagtatcattctcagcttcttccatttcactatatagtagattagcttcatcattatggttatcagacaattcatcgcttggggaacaacaacatttttgcactaacaatacaaccaaaaataataaaggtattatcagaaatgatacagatacaaataagaatgataacagtggatcttctggttcctttgtatctttattgatagtaaaatgtgcatcatttatatcatctgataaggatttgaactgcactatgtcagcatcgctgttagctagataaggcattattttatggttagattctttcttgtaatactatacgggatataatataataatagaaatgttacctgttatttgagtatgcaacaatgaatatttgcctctcacgtataatctcagttgaacttcacctaatcaagcttgtacctttgcaaacaggacatataagcagcaagtgaagacagaatcttgtaaaaaaaagaattccacattttgtgatgacgatttctcacgaaaacaaaaaaaatgagttcttcgtctttactgtgactgaaatcttttaatagtactaacacgaaattttagtttggttatctctgtaaaggctttcatatagcaatagatacgtatatggagaaagaatatacctttctaaatgagtggaattgataattatacaaaatctaaaaagttaggtgaaggtacttatgcggttgtctatttaggtacccaaatatctactaatagagaagttgcaataaaggaaattaaaactgaaggttttaaggatggattagatatgtctgctattagagaagtaaagtatttacaagagatcaaacatccaaatgttattgaacttatcgatgtctttagtgacagtaaacaaaatttaaatttagttcttgaagtgttaccaagtgatttagagaaaatattacgtgataaaaatattgttataggaggtgttgatgttaaacgttggttattgatgcttttaagaggtgtttatcattgtcatagaaatgggatattacatcgagatttaaagccaaacaatttgttgatggatagactaggaaatctgaaaattgccgattttggtcttgcacgatgtttaagtcaaccagatgagaaattaacgtcaaatgttgttactagatggtatagagcacctgaacttttatttggtgcaagacattatacaggtgcagttgatgtatgggcagttggtacaatttttgctgaaatgatgttacgtacaccatatttaccaggatctgatgatgcaaatcaattagttataactatacaagcattgggtacaccaacagaggaaatgtggccaggagtttcacatttaccattgtacaataacttgactatatatcctgtacctaccagaaatgaacttcgaaggagatttgcagctgctagtgataatgcacttacattactggaaggaatgatgatactgaatccatccaaaagatggacatgtgaacaagctctcatgagtacatattttgtagaggaacctactccatagattacatagaatgtttttaatatttggtagatcaaagagattagtaaaacaccttactttatataattattagtaagaaaagacatctcgtaatcaggaaaattttttatttttcactgtgaaataaaataaatttcattttaaaaaattttaaccttgtctttactgcttctaaaaaggaaacaagacccaactggccctactaagatggagactagatcaaacatatttacctgtaactcatgtcaaattcaattttcactttcagaagatcaaagaaatcatatgaaaggagaatggcatagatataatttaaaaagaagagtggctcaattacctccaatagatgaagagttattcacatcaaaagttgcagttcttgataaaaagaaggaagaagaagagagagattctaagttagctgatgatttaggcaatcttcaattaagtgctaaacaattacgtaaaaagcaacgtgaagaattacttgaaaagaagagaaaattattagaacttgcaaagaatagattagtcagtaacggtggtcgtgttaagatgggagaggatggtaaaataatagttgaaaagaaggaacctactgtagaagaacaaaaattaaaagaagaagttaaagaagctattataaaagaagataaagaaaatcaagtcgatgaagaagctttaataaaggaaaaacttgcaaataaagttgaagttcctgtcacaaaatgtattttctgtaaggatgaatcgtttgaaaatgttgaaggaacttttgaacatttattcaaaaagcacggaatgtacgtcccagaaagaaaatatcttcaaagcccagaaggtttattatcttacttgtatgaaaaaatcggtttcggtaacgtttgtttatcttgtaactttcaaggtagaaatttccaaagtattattcaacatatgctaagtaaaaatcatataaaaattccatatgaaaatgaagatgaaaaacttgaaattagtgatttctatgatttctcaaagacttatgaagttgaatatgaagaaggagctaatgatggtgaatgggaagatgttgatgaagaagaattagaggaagatgatgatattgaaggtgaaaaattatatgcttcagattatggattacatttaccaaatggtgttgttttaggacatcgttcccttgtgaaatattataaacaaaacttgaaacctgaaaaggaatggtctgaaggtcaaggtactgttatggctgctgaaactagaaaattcgttaatactattgattctaaggcaattgctcaacaaaaacgtgtttggaatagagaaaacaaaagtagagacagagatgatagacgtgctcaaaaattcattaactggcaacctcattatagagatgaattattacaatagttatgctgccatgatatatatacttattactctttacttatctttatattctatactatacattgacgtttgctaagattttactatctcaatattacaatttaaaaacgaattacttgtacttgtaacgaaatttcgaatgaatgtcaacaccattattgttaatgttcttaacataatgaaaacaagcatcatatatatatatatatatacattttttcatagctttcaaaaaattgggcattatcaaacagtaattaactataagtttaattgattatgaaatccaagacctacacgttaatttttttttttgaattttcaagtctcctccttaataatcgtgtggcagtttggcgtttgtttgtttccaactctgctcatatatcttcttctcaattactaacatagatagtaatacaatccaaaaacataatgtactttgatcttgatgatatattagcagaatctcagaaacttactggtaatttccaaatggaagttgataatttagggtttttgatgaataatacaaataatgcaaaaataacaccaagagagaaacttgaactaccattttggctcattacagcactaacttttataacaattcatgaagaatctaaaggtacaaccagaaatattttttcggttgaaagacctgaatatttgagtaaacttgcaagtaatttttacaaagcttcaccacttaatgccgatttgtcagtcgtttcacatttttacaaaattgtacaaaaatggtgtgactttattgaacaaccagaattagttgatatagtttctgatatgttgattctacgagccggtaaaatcaatgacttatcatttaatatatcagattcacaatcaagagaaaatatggaatttttgcaaactttagataatcatgagaaagaaatattgaaggttactagtgaatcatataatgatttcaaaacgtggttgaactctaaatgacttaagtaagagttgggaagtaattgaggacagaagtctgctcctggttaatattgaataaactttctgggataaagttgaataacaatatatcctaattcagaaattacagctcactattttcaactatatattctgcctgttatgaatgctttcctacggtgtatatagctccaataatagagaaagcaatccatcgtcaacaagattacgtaacacactatatcaaggaatttaaattttttttttgaaaaatttcaattttcgttgacttctctaagccgttcttcttggtttatttatagatttatttatagctcttctgtttagctttcacttaaccaacattattcaaacatggctaagatagttgtattaatttcaggaagtggatccaacttacaagcattaattgatgcaagtacaggtgaaaacccaactttaaaaggtgatatttgccgtgttatttcatccagtgattctgcatttggtcttgaaagagctaaaaaagctggtattccaacaactattcatacattgaaaagttataacgctggtattccaaaagcaagtaagaagaaaagaaagagagctcgtgatcaatttgacgcagatttagctaaattagtcattaatgaaaatccagatttagttgtctgtgcaggttggatgttaattctttcattagcattcttaaatccaataagtaaagctaatattccaatcattaacttacatccggcattaccaggtacttttgaaggtacccatgctattgaaagatcatgggaagcaggtcaaaaaggtgaaattactaaaggtggttgtatgattcattatgttattgaagctgttgatcttggtgaaccaattgttgtaaaggaaattcctattattaaagatgaaactgttgaagcttgggaagaaagaattcataatttagaacatattgcaattgttgaaggtgctcaagcagctcttgatgcgacaaagaatactgaaactgaagaaaaatcaaatgttgcagaagtccctgttgttgcagaagaaaaaacagtcgaagaagaaactccagttactgaagagccaactgttgaagaaacagttgcagttgaaatcccagtagttgcagaaactcttgtagaagaaaaaaaagttgaagaaacaccagtggttgaagagccagcagttgctgaagatccagcagttgcagaatcagctatcgaagaaaaagttgttgaggaacctgtcattgaagaacctgctgttgagaaacctgtcgttgaagagcctgttgctgaagaacctgctgttcaagagtctgttgttgaagaacctgctgttaaagaatcaactgcagaagatataattgaagataccccagttgttgaagaaacaccagttgcggaagttccagttgttgaaacttcaaactctacagaacaaccaactgttgaagaaactccagtttcaaagaatacaccagctgttgcacctaaacaacaagaagcaccaactactccaactccttctaaaacttcccgtacctgtggaatttgtactattatgtaaagaatcacatgtatttttaatacatagatccattgtatatattttattctatatataacagaaacattcaataaacacactgtaccaattatcatttcatctctatctctagctgtaacttgtaaaatactggaaagtgaaaataatttttcaaaaagctaagccgctgaaaaaccctaaaaaattcaacaccgcggttaattgaactataacccttctaataaccacttttggcattgcttctagggctcaacatgaatattgctactgtcttgatctttgctagattgatatatcattattgcaagattatatgccggtgcttttataatcaatacacagttattaaaaacatgctctttttaatataaaaacagtatagggtataaaacaaagtatgttatgagcttagccgagttactcttttgggaaggtcaaggcggtgtcactgtacaagtgggacaaatttattggttgaaaaaattattttatttatgataataaattcgttgaaaagcgtccatcaaaatattcaagtataaaaaggagtgaacgtttttaacttctgtaattgaacttgaatttgaaggtttgttctctttaccttcttttctttttttttacttttgtctgaaataataaataacacccaaacaatacccaaaaaacaatgtctgaattaacacaccctatgattaaagatggctggttcgctgaagtctcagataccatgtggccaggtcaagcaatgagtttacgtgttgaaaaaatcttacatgttgaaaagactaaatatcaagatttacttatctttcaatcaactgattatggtaaagttttagttttagatggtgcaattcaagcaacagaaagagatgaatttgcatatcaagaaatgattgcacatttagcacttaactcacacccaaatccaaagaaagttttagttatcggtggtggtgatggtggtgttcttagagaaattgttaaacatgaatgtattgaagaagctgtgctttgtgatattgatgaaggtgttatcaataactctaaaaaattcttaccaggtatgtctgttggttttgaacatccaaaagttaaagttcatgttggtgacggtttcaaatttttagatgattataaaaatacttttgatgttattattactgattcttctgatccagaaggtccagctgctgcactttttgaaaaaccatatttccaactattatcagatgctctaactgaaaatggtgttattacaactcaagctgaatcaatttggattcatttagatattattaaaaatttaaaaaaatcatgtgcagaaattttcccaaatgttgcttactcttattgtacaattccaacttatccatctggtcaaattggttttatggtttgtactaaaaataagaatgttgatttaactaaaccattaagatcagttgatgcaaaggaagaacaaaaattatacagatattattcaaaggaaattcatgaagcttcattcgttttaccaaactttgcaaaatatgcattacttgaataaattttaaatttaacttaatattattttatattctttgtatgtgtgttatattatataatgattaaatcgtagtctacaaccttttttttacttctatcttcaaattttcttgtatttaggcaagattatattatatgctatgtaattcaattagtttattgtaaaatattcatactataaaaaagtttaaatctaagctacatcaacttccatttcttcaacatctaataaattccaaacactttccttaagaattgcagttgtacctcttgggaatttataattattttgtttctgttctctaacattaggtgtaagataatttctatataattgtgcatctttattaagttccataacacataagtcaacatttgaacctgaacctaaatcattccaaatacctgcttgaattgcatcacttgctaatttcattgcttcttcctttgttaagttttctttccaatctttttctaaaactgccattgcagctaatgaaccactaccaagtgacatataaaatccaacatccgtactaccatgagcatgaatactaaataatccaacaccagttggatcaacacctgcaacaattaaataagctccaacatgaccttgatatttaaataaatgttgtttaagcatttgcattgcactgacaactcttggttctctatttgtatttaatgaatgtaattctaaatttgatgcaattaattgtgtaaccatctcagtatcagctgcagtacctgcacctgcacaccaaatttttggtgacaaacgatgtaacttttcacaatttttatctgcaacaattggacctgcagttgctcttgtatcagctgcaataactacacctccattaaatttacatccaacaatcgtcgtacctgttgatgttgcctttggagctttatatccggcttcatttattaaatattgattcctttgataattgtcaaatttcagtcctgccatcttctatgtctatatattgataatagctaaagaagtataagatgtataagaagtataaaatactgataagtttgccactgaattttaattaccaattggtgtaattaagatttcaattttttgatttctcgcattttcatgattcctagtatactttattttattactgttactgctacttattactgctataactatacttccctgtctgtataaagacattgtagatgataggtgttgactgtataaatgatacatgtattagtactaactcttagtatacttataaatctgtagaataaaccaatatatcccctaattgtaccatatactcgataagaacataataaaataagtctcgcacctgctaatcctgaaattagatcttcccaaataacatctaattgattagatttgctttacattgaaataatacttgatacaaagccccaattaatatattataatagaacataatgggtgtatttttctcatgtttaaagccaatacagacacaaaatgaagaagaagatatttcatcattatctgatgatagagcaaaactaatagaggatgaattaagtacagaattaaggaataaacaattaaatgcaatccttaatagtacgaatgatcatttaattgatataactacatttaaaacaatggttgattatggatctacaacatctgaacataatgaacaagcaacaacaacaacaaataaatgatggtgaagaagatgattttaatgatatttttaaagttacaccaatatcacaagaaatcattcaatcagagattgaaaaggaattaaaggggtggtcacagaattatggtgaaattgccgtacagaaatatttagatatacctgaaccaaaaaataaagagaaacttattatagattttgtataaaatagttttatattaagttagggttatttttatctatattttatattactttaaaaaagaaaagataatatacacaattattgtacataaattattgaaataagaaagtttgattaaattgtaataattcaacgtgttatattcaaccaaattttaacattttcaataaattcttgagatttttcaccttcatgacgttcttgacgattcattttttcatcttcattaattaaatcttcattaattatatcatttgatgtaacatcatttgatctacctcttaactgggaatggaacttttaaagtaaattcacaataatttaatccataatctaattttaatgcaaatttatttgcacaaaacataccatcttcatcagaatcatcattatgattaattgaaaatggtaaacctttaataacttcaccattaacacgtaattctgaaatatatttttcatcaataattttattttgtaaataaacattacatgcaatatcatgaccaattactgcctctccaggtaattgtaaaatataatttgatccaccaattgtactcttacctgcaggttcctttatgattgtttcataaattgatggataatttatttgatttaaatttttaacatcttttaataatgtaacataattatttaaattagttgttgaacaaattataaattttttaataaatgcagttatatcatcaatttcttcaattttacttgctttttcaatatcatgtttacgaataatggttggtatttcaacagttgaaggtggaatttctatatttttattttgatttatatcattattaatattgttattgttaatattggtggtttctgtatttgattgggtttcttcaactggtatattatctgctttcttcatcattagcttcttcatcaatataactatcatcatttgttacagttttctgttttgatttagaatttgtagtatttgatttactactattactaccactactacttggtaattttttatccaatatttgtgattcaaatttttcaattcttttatgaaatgcctttgataaaccttgagcagatttaaaatatgaacctgatgtgaaaacatctaaataattatcaaacatcaaatttaaatcattaacgaattttttataaccaatatttacccattgaataattaccattttctaatctttcattaattatattaaaacataaaggttcagttacaatatcatagaaatcttcagtatttggatcatcctttggtggtaattccattagagttttagataatggaactgaatttttatggtgtgatactttaaatgataacagatgtttaaatattttttgtaattcattagtataatcttcagtatcattttcatcaaattcttcatcttctagatctttttcatctttagattttgattcaattttaaagtttttttgtatctggcctttttattttcagatttctttgaatccgattttgatttttgtatctgatttttcaactactaataaataatttttataatcattaattcttttcaatgcataatctttaataagatttgcatcattaacaattaaactttcaggatcattataagttgcagcatttgaactcattaaaatccacatatcagcaaattgatctaatgaaatttcaggtgaatttttacgttttgaaattgttgcttgtttaatttcacttattgaaattgggttttcaattaattgataataatctgcataaattttctttggtggtaattttataaatggacctgatattatttcatcggtttgtggatctttaaaattaattgcattatttattacatcaccgaaaaattcatttaaatttttaaatcttgataatgtataatcaattgagtcagaatttatatcaatattatcattcgtatcttgatctacattagtcgcatcaccctcttcttctttatccccttcaccattatcattatcatcatcattttcttcaacagctgaattaatcagtcgttcagcagcctcagctgcagcttcatcaacagattgttgaagttcagtcttttgctttttacgaggacccaaagttagagttactttccttctaggtggcatagtgtattatgttctgtgtagataattaaatcaatatccaatatataagtaaacatccaagatcattaacattaacatgctcatgagtaaaacctgcaaaaaagagaaaatcttcagacgacgcgactgacatagaaaccgtacaccttgaaaagcaataagtggggaaaaataaggtaaagtgaattttctcactttaatttgatgaacatgaatattatgtagagggtatagagtatattagatacagctgaattgatttagaatatttgttttaacttatcatccgattaacaatgtcaaaatacgaagttattgatcaagatcctttatttggtaaggttgtaagttatttccgtccaagtgattatttaacttggttaggtgcaacaattgcaggtccattatcattaattgcattagaaaaatatgaacctgcaactggacgtcaatttaaaatgccaaaaccaatgtttttacgtgcaggtgcattaattggttttacaacaggttttattttagcttataatcaatcaactaaaagattttggggtgtatctgaaaatttaagggaagttaaaatggatagattagaagttaaaactttattatcaaagggtaaaaatccttttggtagtgatgaatcaactttaacaccttatttacaagatgtttctgcaagatattctaaaaattctcaattattattaggatttttaccttggtttaattttgttaatcatccttatcatggaattgatttaaataaatattatgaagttagagaaggtgaagaaaattgggatcttaaattagttcctttagatcaaattaaaggtttaccaaattagagaaaataaaggaaaaaaaataagaaaaaatagcaaagtagaaaaatttcaaagggaaaatctttagcttttaattcaatttattcaaaatatagtataatgtaatcataatgtattatattattatattatcatatcatatatacttttacgtactaataaaaacaaaattatttattattcattaaactagattaaagaaaagattaaaatttactttttattaacttcctctattagagattgtaacttatttcgtattctttgacctccaattggagatttttcattatttttataataaagattccaaattatcatccattgatcaaacaatttatatttttcccatgattcaattgttaattcatttggattatattccattattgcttgattaatcattgaaaatcttaaatttaatattgaaaatttcataaaattttgattttcaatttcaattccatattcatattgtttaaatgtaataaacattttaacaatttcaaaatttttaaattgtaaattaacagtttcaataagtttaatgattttattgaaaatattataatttgataaatctatttgattaagttgtttaatatttaatgaattatttaaaattattgattctaataattcccaatcattttttgatatcagattagggttttcattattaaaattattaaataaactaactaattgattaattctactatatttatccaatttgaaaggatttttaacatattgtaataaaattaaataataaatatcagtatctaaaatgtctaattgattaaataatgaatcaattgaatctatttgataattatttgatattcgatgtaataataaagattttattatagatttctgtatattataatctgatatttgacttaatgaattatgtaaataatcaagtaactgatttcttttcgtatttattgttaaatcattttcccatttaactaatttagctagttgaaatgaatatgttggtaatttattaatatcattaactggatttggtagggtatttttattaattgacttatttttattattatttttatatgaaggatagatttgtaaagtatttaagttataaatttgttcaaattgatgaaatttcatcattttcaaaacaacattagtgaaatcattatttgtatttgtacttatatttgtatttataattaatgtttctttgattgaaattaacttttcatttgcataatctttataaatttttgaagttttattaaatattgttgaatgattataatttttcaataattttgaaggtgaaagcattatccattagtgatatttgaagaaaaagtaacgatggagaagagagaatgatttttttaatctatatagaaaaggtttattattattattattattatcattattattattgttatattataaattacatgttataagatacatcatactcttaacgagcctcaaattgtaccattctcttagttctcgccttgtataaaactctatgaccacattctttacatctaactggttcctttggtgaaagtgtaaaattaactgcacattgagcacaaacatatttcacaccataatttttaatcgattgcataccactggcagcattacctagattagcagcagatggtggtacaaaaccttctcttgacattgtacttaaagtggtgtctgtatgtatagtcttactagttatatctctctgaaacagggcaacaagagatatatatgatataaaatattattatggttaatattatcggatagtcccatcgaccgcgccgttgtttaattttcaactttgttcaacatgttgaaatacttttcatggatttttcacatatttccagtgttaatgttgtagattggttggattagttggtttcttaatcattattactatcacctctatcttcaattagatctcttaattcaatcatgtatggcagatgctctttggcactgcgaataccgcatttattcatacgttcattacataaaagaagtcgatttcaaccaattgatccaattgatataaatcatttaaatcatataatcatacaaaaattaatgaaaaatttaatgttttaataagtaatgactctaataataataatatagataataataataataaagatttagttaataatttggaaatttcattattacaaaattcaattatttcaaaattaaattctttagactattcctcaaatgatttttatgatattcatttattatatgaaaaggataaattattattagaattatctgaaattgataaacatatattattattatcaaaggaaattgctccagattctacaaatatttcatcttcctcttctactacttcaaattatatctattctgatgatcttgaccttcaaaatttccaatctcttaaattcaaatatgatttaatcaataataaaaattcaataattgaattagaaactttaatagattttgttaatcgaatatctcaaaatcattatttaaattataatttaatgattaaaagattcttgaagaaaagacttgtatatgcaaaggatattcacccattattaagagataataaagaattaatttatatattaatgaattatttcctgaaaaattataaatattctcatctatcaattgctaaatatattgtttcaattaatggttcatgggatatttatatgattaatattttattgaaaaatactcttaattatacttataatttatctcaatctttattaattatagatcaaacattacaaaaatgtattaatgataagattcaattaaattcaactacactatttttgatttatgataaaattaatgatttaaaagatatcgactttaccatagcaactgatttaaataattatttacataaattatttatcaattcaaatttgaataataataaacattttactaatattgcatataaaaaattattttcaaattataagaaaattcaaaattcatgtactttaaatacccaattgaaaaattcactcattaatgattcttcaaattcaatatctttgattccattattatatgaaaataactcacaatttttaaatggaaatatttttcagataaaatcaattgagaagttatatttaaatacaaaatttaagaatatttatactttcaatagatttattgaaatgttgttatcatcaaatcaatggaaaaaagcatggagttcaataatacctgtatataatgtattagattcttattcagttgattgatttaacatcaatagttaagaacagatcaaatagagtccaattattggaaattaatcctcgatttaatatttcaaattttggtcgattgtttcactatgacaaacactttttatcttatcaaatcaaaaattatttatctgtaccattattaacttatcttataaatactaataattggcaattattaatacgttcaataaatgaaattagaaagataggaaattcaattaatgaaaataattcaaattcaaaatcaaattcaagttcaaattttaatggttatataattgaacaagtacttagaaaattatcaaaattagatttaaatgattcatatttagataaaacacactttttaattttatccaagtacatattaaatttgtacttatcaaatcaatattcatgtttaaaattttctaatgctttgataaatgaattacaacataaaattgacaaactttatgatactaaatattcatatagttcaaattttaacaataaaataaataaaagaattaattcggtgaggaccgaatatttatcaaccaataaatttaataaaacttcactgttgagttcatgtttccaaacatcatcatcatcaaattcacatatagaagataaaagtaatagcataaacgccaaggacatatcaaatgatgatttatattctcctaatattttggaatatactaaatttgaattaagtttgtatgaaaatttagatcaagttatatttacttgatacacctgaaaaattgaaaaaagagaaggacaaatattataaacaatgggaagataaatgtataaaggataaagatatacttaaaaattatcatttaggatttatcaatagagattacagtagaaagaatattaaatgggttaataaaaccatgaatgatctaatgaaaggagatgagattaggatagaaaataatgaaataaaaaataatgtaaataaaaatggtaattgatgatgatgataaatttatagatgaaattaaaaataataaactaaacaagattgaatcacaaataaaggatgatatatcaaaattgttaaatacatcatcaaattttaaagtaatggagaaaaagtatacaaaatcttatcctgatgggaaatttgttattataaatccaattgaatcttcaattcataatattcaacctaatgattggatagattttgttatcaataaaactttaaatgataaaattactgagaatttatcaaattaacgaataaaatcttttttaatgaccctagaacaaaaaatataatatttatagattaaatacgtttttataagaaaaaattgtaaatagtaaaattagattaaattaaatgaaataatgattattataaacgtttccgtcttttcttgttttatataaaaaaataatgattataaaaatttgttacaataagataaaaaaataataataaagtgaataagtaagtaaatagaataaatttgttaatgcaaaactatgccttcttttgactaccaatcttgttgtcttctggtttcttttggaaaatagtggtatccttttcatgtctgacctttggaattaatgatgatggatttaataatttagtaatataaccaaatggattcttaccaataactctgaaataataataaccacctaacataaatccaacatttgcaaaaatataaatccatgcaataccaaaatctctccaatgttgactccacttgataccatattgtgcaacaacttgaatttgttcagtatatggacaatacatacaattggaatcttgttctggatttctcaagtaaccaccgttattagtaataaagtcattgaaatattcaccacatgtttgacctgaaggtggatcaacaatacttaactcactatatgcacattcaagttttctaccttctaaaattggggcaacgaatgcttgaacgaaataaggtaaatggagatgcaacatacatgaatgaccagaaatgtggggaatatctgtttaggattcaaaataccacagaataacaacatggctgcaaataaattagagttgatcatagaagctgatggaacatctggtgaaaaatataagatagctaaaccgtaagtacaataatataatgggaaaattaagacattaatgaaaaagaagaaacctgccttatttgcatcacctgaatatcttggtggccagtagtaacaaacgtaaataaagaattgacagattgttgaccaatagatttctaaaattgtgtgacataataataaacatgaccagtggaaagtgttggataatgcttctctgacttcaaataattctctagtatcataagcaaaaacatgggattggttgatcatagcaacagaaattaataacaacatgaaaacggatgagaaggcattttgggcaccaccaatggtgtgatccataccgacataagataaaccaacgaataaagcacaagagacacattctaaaaacttagctctaatataaacaggagatctccaaaattgaacgtaagttcttcttaaaacaaaccaaaattgtttgtcatatgatgtagcatactttgcactcaagtcacctgcattagtattaacaggtctttttggtaattcagcgtgtaagtaatcaatatccttagtaatttgtgcacattctggtgaattgttccaaagttcagcccaatcttgtgcagcacttgcagttgcaccagcaccaatacaattcaaaatatactctgcaggattttcagatttaccacacttgacaccggagtgatgttcaaaataacttaacatggtggatgagttttcaccaatgtcaccaaaataaactgtcttaccacccttctttaataataataatctgtcaaaaacttcaaacaatgtagctgatggttgatggatggtacataaaatagcttgaccggaatctgcaagggctctcaaaaattgaacaatcgaccatgatgattcagaatccaaacctgaggttggttcatccaagaataataataatgatggcttagcaactaattcagtagcaatggataacttttttctttgttcaacattcaaacctctaccaatcttaccaaccatggcttcggcatatttgtccatacctaaacatccgataatcttttcaacatattcatatttttcagattgtgaaacttcctttggttgtcttaaatctgctgcaaatcttaatgattctctaaccgaatactctgccatatgcaaatcttgttgttgaacataacctgttcttctcttgaatgatccatctaatggtctaccattgactaacatgtcaccagtaatggtaccaaatgaaattctttgtgctaaaacgtttaataatgtggtcttacctgcacctgattcacccattaatgctgtcatggtacctggtttaacataaccttgaatggaacataataattgtctggttgcaccgtcatatggaataatgtaatctaagtttttccaggagaaaatatctgcttcggagataatcttatcctaaatcagcatttggaccatttaaggcaagcatcatttcttctctagtagcaaccttaccatcccaatcttcaccacttgaagtatctggtaaacatcctctcttaaataaaagcatgtcaccaccaccttcaacattcttaatgaattcagacatcaaaacattcaagccaatataaccagcggtccaacaaatgttgacaccccagtatttccaaacattatgccatctaatatcaaaagcgtgatataaataatcatcaccaagaacccaatcttgaccagcgatagaacctgaaacactacaaatttgatttgctaaggaagcattttcataacctggacctgatggaattaattcgtgacatgccatatgtctaccatggaattcattacccattaatgagtagaaacagtaaaacatagggttcaagtaatgaatccatttaatccaatgatgcattttatttaacggcaaaacaaaacctgcataaacacacatcatcaaaacccataaaccaccaactgcatgggcagtggtaccatctttggtaacagttgcaacacacttgaaagtaaaagacatacattgttgaatagttaataggaaaagcaagtacatgaaaaaacgcaccggcttcgtgtttcaaatttggcatccaataagtagttaaacaaagaataacgacagcaattaattttgttgggaattcggtaataatttcttgtaatgcttcagcagacaaatggtacatcgaataagacttatgtttagttaaaatatttctagttgaaaacgagttagcaatttcagccaatgatgtaagagaacagaaaagcaaaacatagaataaaataccaccacgagaataagcaccattagttgatttaggaatatgataatacatggaaccaacaacaaaacctttagtgacaaatgaggaaacataaacaatggtatatgtaatattaccctttgttctttggaaacctcttaacatcaagtaatataattgtgaccaataagtaaccataaattgagagctttgtctattacccttttgttttctttggtgattgacaaaattcaagtctttgtcttgtttcttccccattacggttggcattgaattcatccaattgggtcatcaattcggcatattctggtgaactaacccaagtattctgcaaattccttcaggatgtttctggaaccttaccttcaaaacctggctggacttgtctggatgatggtgatgtaacagcagttaaaaattctggagctgtcattctggatggcttcatgtaacccattctttcaaaatattcaatacccttgtctgcaggaccccagtaaatttgtttacccttgtaaagaacacaaaccttatcaaataactcataaatgttttgaccagcttggtaaatagcaacaaatgcggaacaacccatcatgttggtggcagttcttaaacattgagtgaactctaatgcagtggatgcatctaaacctctaggtagcattatcgaaacaataaactgatgcacttaatgataatgcttcaacaatagaaactctctttctttcaccaccggaaacacctctaacgaaatcgttaccaacacgagtagcataagtatgtgttaaaccaaaaacggtacaccataactataataataaaaaggcggttgtaatgttagtatttcaattcttgatgaaaataattggattaataaaaaaaatatacttactcttaacatgttatcaacatattcttctctggacatattatcaactctcttttcaggagtcttacatcttaatgctaattgaatggtttccttaacagtgatatatgggaaatggaaatctaattctggattgtaaacaatataacccttgaaatgtttcatcatatgttcttgatctaaaccatcataggaaaaaacaccttcaactttagtgaaattttcaatttcacctgcaacagcttttaataatgatgaacaacctgcacccggtttacctaaacataaaaccatctcaccaggttctaagacaccaacaaagttttcaatgatctttctttgtgcacgtgtatctttttgaaacttcttccaaaattgaatgtattcaagagacatttcagtaacagatggaccatgagcagctgaagcatcaataccccaacatgtaacatcagtggaatgcaacaccagcattagctgattcaataccttgttcagcagatctatcacgtaaatattttaataataattctaaatcaaaattttccttgttaatttcaaagctatccatatctttcttagttttagtggataagactcttgcaagagatgcgacacgatccataccttcttgagttgataaaatacgtgtaacatgtttggataagtttgcagcagtaccttgttcttcagcatcatttaaggggtcaaatttttgaactcctggagaatctgaatcgatactctcagtatcactagcttgtgttaccactagttcctttttccatttttaagtaagaatgtttataaaggtatcactaatctgttttttaatttgattataaacttcaataaactggggtggataaaatagttgaatggtatcactgaaatttaagcaaaaactatattaaatttaatctagtaatagctggagaaagagtaatattaaaaaaaaacaagtgagtcaagtagacaagaaaatatgttgaaacaaatttctgctaagggtactatcatatatttaaaccatctcagttgattttgaattattctgttgttgaaagtgaaagtaaaagtaaataataaaataggcaatattatcataaaatgaaaggcataataacaataatatcagaaccacgcggaacttaaaccatcattatctgcaaaaggaaagcccaaattggaaataagataaacaacataaactccttggtagtaaattaatgatgacataggcattgggtacattctgagattgaatcatgagaatatgaactcttagccaggccagaccttttagtgagctttcttcattgtaataccgcgctgaataacgtaactaatgggaatgatgttaattatcaacaactagtattgcccttcactaaatagactacctatatagcagatagttatctctcggataattccggcactgagttttgtcaactagctcaggtaatgataatatgatgtgaaaaagaacttaaaatttttattcaggatccaagttgttaaaaacgtaaaccgaagagatcacttggaaactaagcacaaaatgcagtgaaacttgtctgctctggtatatcttatcgtgtattaattgttgttatcaaagtcatatagtttaagttgaacgatgaggcggcttagcattttgttaaatcactatcaaaaaaattgacatgaaaagttcccgcgtcataacatgaatatttgcactggtattacatcatcacttaatcaatattaatatatagttgtgtatggcacacaacaaggtttaaggtgtgtgtatggcatgtacaatgtttccggtagtgagtttgcaaagtatttatcatcaattttcaatgtatttttttaaaatctgaaaagcttgtagttagtatcttcatatttaagggataaatgtatactttaaaatcacttcgatccatatatctataccagataattagatcaaacattcaaatctaccagatgtatattcataagttttcgtagattatctcacactatagtaacagaataataacctatatattttgtatcgtgggctctgaacggctgaatacatgaaagataaaagattgtaaacagtgtggacatttttcatggcaggttgtaaattcagtaacaattcaatggtaaataatcacgcgtcactagtggtcttgataaatttcaaagtttaattgatcttgcatatttccagtctaaggatctataagccattcagtcattgattaaaaaataactcagtttttcaacttatttgaaggaatctaatatctgaaagtgttacaaagtttgttttgataactagactacagccaatttattatataaattgccatctcccctattttttgatccaagaaattttcttttctttcatcttataattaggttttctgtatttttaactcatcgaatttgttaaattccatttgactagataaattatactatctcaaaaattcatgttgtcaatcttgattgcatattatatgtgagacacactatcattaccgaaatcaaagagttctgtagatgagatacacttagaaaaccacatgaagggctccctctaataagcggtcgttcataattttaaaataatttatcaacttcgctaaaagttactctgcaaaatgagtaaaacagtgttgttcagtagtaacattagtgaatctaaaactgttacaggttgaaattttaaaataataataagaacttggctgttaaatttaattaatgaactataaatggttatataaaaagaatcaaataaaaaaatcgatgaatatagtatttggaaaataaataatttgaaggataatgcttattcgataatccttagtttgaacaaaaaatttgtaaattgtaaaaataaattgtaatcttcaggaagaacatctcgatcatgccttcttgttggaacctatcttattgtcttctggtttcttttggaaaatagtgttatctttttcgtgtctaacctttggaattaatgatgatggatttaatagtttagtaataaaactgaatgggcttttcctagcaactctaaaataataataaccacctaacataaatccaacatttgcaaaaatataaatccatgcaataccaaaatctctccaatgttgactccacttgataccatattgtgcaacaacttgaatttgttcagtatatggacaatacatacaattggaatcttgttctggatttctcaagtaagccaccgttattagtaataaaatcattgaaatattcaccacatgtttgacctgaaggtggatcaacaatacttaactcactatatgcacattcaagttttctaccttctaaaattggggcaacgaatgcttgaacgaaataagtgaatggagatgcaacatacatgaatgaccagaaatgtggggagtatcttttaggattcaaaataccacagaataacaacatagctgcaaataagttagagttgatcatagaagctgatggaacatctggtgaaaaatataagatagctaaaccgtaggtgatatagtataatgggaaaattaagacattaatgaaaaagaagaaacctgccttatttgcatcacctgaatatcttggtggccagtagtaacaaataaaaattaagaattgacaaacggtagaccataaaatttcaacaattagtgtgacataataataaacatgaccagtggaaagtgttggataatgcttctctgacttcaaataattctctagtatcataagcaaaaacatgggattggttgatcatagcaacagaaattaataacaacatgaaaacggatgagaatgcattttgggcaccaccaatggtgtgatccataccgacataagataaaccaacgaataaagcacaagagacacattctaaaaacttagctctaatataaacaggagatctccaaaattgaacgtaagttctttttaaaacaaaccaaaattggtttctgtaggagttagcatatttggcacttaagtcacctgcattggcattaacaggtctttttggtaattcagcatgtaagtaatcaatatccttagtaatttgtgcacattctggtgaattgttccaaagctcagcccaatcttgtgtagcatttgcagttgcaccagcaccaatacaattcaaaatatattctgcaggattttcagatttaccacacttgacaccggagtgatgttcaaaataacttaacatggtggatgagttttcaccaatgtcaccaaaataaactgtcttaccacccttctttaataataataatctgtcaaaaacttcaaacaatgtagctgatggttgatggatggtacataaaatagcttgaccggaatctgcaagggctctcaaaaattgaacaatcgaccatgatgattcagaatccaaacctgaggttggttcatccaagaataataataatgatggcttagcaactaattccgtagcaatggataacttttttctttgttcaacattcaaacctctaccaatcttaccaaccatggcttcggcatatttgtccatacctaaacatccgataatcttttcaacatattcatatttttcagattgtggaacttcctttggttgtcttaaatctgctgcaaatcttaatgattctctaaccgaatactctgccatatgcaaatcttgttgttgaacataacctgttcttctcttgaatgatccatctaatggtctaccattgactaacatgtcaccagtaatggtaccaaatgaaattctttgtgctaaaacgtttaataatgtggtcttacctgcacctgattcacccattaatgctgtcatggtacctggtttaacataaccttgaatggaacataataattgtctggttgcaccgtcatatggaataatgtaatctaagtttttccaggagaaaatatctgcttcggagataatcttatccaaatcagcatttggaccatttaaggcaagcatcatttcttctctagtggcaactttaccatcccaatcttcaccgcctgaagcatctggtaaacatcctctcttaaataaaagcatgtcaccaccaccttcaacattcttaatgaattcagacataaaaacattcaaaccaatataaccagcggtccaacaaatgttgataccccagtatttccaaacattgtgccatctaatatcaaaagcgtgatataaataatcatcaccaagaacccaatcttgaccagcgatagaacctggaacactacaaatttgatttgctaaggaagcattttcataacctggacctgatggaataaaaacatcacattgcatgtgtctaccatggaattcattacccattaatgagtaaagacaataaaacatagggttcaagtaatgaatccatttaatccaatgatgcattttatttaacggcaaaacaaaacctgcataaacacacatcatcaaaatccataaaccaccaagtgcatgggcagtggtaccatctttggtaacagttgcaacacacttgaaagtaaaagacatacattgttgaatagttaataagaacaacaaaaacataaagaaagcaccggcttcatgctttaagttaggcatccagtaggttgtgaaacctaaaatcataacagcaacaaatttagttggaaactcggtaataatttcttgtaatgcttcagcagacaaatggtacatggaataagacttatgtttagttaaaatatttctagttgaaaacgagttagcaatttcagctaaggatgtgaccgaacaaaaaagcaaaacatagaataaaataccaccacgagaatatgcaccattagttgatttaggaatatgatagtacatggaaccaacaacgaaacctttaacaacgaaagacaaagaataaacaatagtatatgtaatattaccctttgttctttggaaacctcttagcatcaagtaatataattgtgaccaataagtaaccataaattgagagctttgtctattacccttttgttttctttggtgattgacaaaatcaagtctttgtcttgtttcttccccattacggttggcattgaattcatccaattgggtcatcaattcggcatattctggtgaactaacccagtattctgcaaattcttcggatgtttctgggaccttaccttcaaaacctggctggacttgtctggatgatggtgatgtaacagcagttaaaaattctggggctgtcattctggatggcttcatgtaacccattctttcaaaatattcaatacccttgtctgcaggaccccagtaaatttgtttacctttgtaaagaacacaaaccttatcaaataactcataaatgttttgaccagcttggtaaatagcaacaaatgcggaacaacccatcatgttggtggcagttcttaaacattgagtgaactctaatgcagtggatgcatctaaacctctggtagcattatcgaaacaataaactgatgcacttaatgataatgcttcaacaatagaaactctctttctttcaccaccggaaacacctctaacgaaatcgttaccaacacgagtagcataagtatgtgttaaaccaaaaacggtacaccataactataataataaaaaggcggttgtaatgttagtatttcaattcttgatgaaaataattggattaataaaaaaaatatacttactcttaacatgttatcaacatattcttctctggacatattatcaactctcttttcaggagtcttacatcttaatgctaattgaatggtttccttaacagtgatatatgggaaatggaaatctaattctgggttgtaaacaacataacccttgaaatgtttcatcatatgttcttgatctaaaccatcataggaaaaaacaccttcaactttagtgaaattttcaatttcacctgcaacagcttttaataatgatgaacaacctgcacccggtttacctaaacataaaaccatctcaccaggttctaagacaccaacaaagttttcaatgatctttctttgtgcacgtgtatctttttgaaacttcttccaaaattgaatgtattcaagagacatttcagtaacagatggaccatgagcagctgaagcatcaataccccaacatgtaacatcatggaatgcaacaccagcattagctgattcaataccttgttcagcagatctatcacgtaaatattttaataataattctaaatcaaaattttctttgttaatttcaaagctatccatatctttcttagttttagtggataagactcttgcaagagatgcgacacgatccataccttcttgagttgataaaatacgtgtaacatgtttggataagtttgcagcagtaccttgttcttcagcatcatttaaggggtcaaatttttgaactcctggagaatctgaatcgatactctcagtatcactacttgtgttaccactagttcctttttccatttttaagtaagaatgtttataaaggtatcactaatctgttttttaatttgattataaacttcaataaactgggggtggataaaatagttgaatggtatcactgaaatttaagcaaaaactatattaaatttaatctagtaatagctggagaaagagtaatattaaaaaaaaacaagtgagtcaagtagacaagaaaatatgttgaaacaaatttctgctaagggtactatcaaatatttaaaccatctcagttgattttgaattattctgttgttgaaagtgaaagtaaaagtaaataataaaataggcaatattatcataaaatgaaaggcataataacaataatatcagaaccacgcggaacttaaaccatcattatctgcaaaaggaaagcccaaattggaaataagataaacaacataaactccttggtagtaaattaatgatgacataggcattgggtacattctgagattgaatcatgagaatatgaactcttagccaggccagaccttttagtgagctttcttcattgtaataccgcgctgaataacgtaactaatgggaatgatgttaattatcaacaactagtattgcccttcactaaatagactaccatatagcagatagttatctctcggataattccggcactgagttttgtcaactagctcaggtaatgataatatgatgtgaaaaagaacttaaaatttttattcaggatccaagttgttaaaaacgtaaaccgaagagatcacttggaaactaagcacaaaatgcagtgaaacttgtctgctctggtatatcttatcgtgtattaattgttgttatcaaagtcatatagtttaagttgaacgatgaggcggcttagcattttgttaaatcactatcaaaaaaattgacatgaaaagttcccgcgtcataacatgaatatttgcactggtattacatcatcacttaatcaatatattaaaatatagttgtgtatggcacacaacaaggtttaaggtgtgtgtatggcatgtacaatgtttccggtagtgagtttgcaaagtatttatcatcaattttcaatgtatttttttaaaatctgaaaagcttgtagttagtatcttcatatttaagggataaatgtatactttaaaatcacttcgatccatatatctataccagataattagatcaaacattcaaatctaccagatgtatattcataagttttcgtagattatctcacactatagtaacagaataataacctatatattttgtatcgtgggctctgaacggctgaatacatgaaagataaaagattgtaaacagtgtggacatttttcatggcaggttgtaaattcagtaacaattcaatggtaaataatcacgcgtcactagtggtcttgataaatttcaaagtttaattgatcttgcatatttccagtctaaggatctataagccattcagtcattgattaaaaaataactcagtttttcaacttatttgaaggaatctaatatctgaaagtgttacaaagtttgttttgataactagactacagccaatttattatataaattgccatctcccctattttttgatccaagaaattttcttttcttttcatgttataattggttttctgtatttttaactcatcgaatttgttaaattccatttgactagataaattatactatctcaaaaattcatgttgtcaatcttgattgcatattatatgtgagacacactatcattaccgaaatcaaagagttctgtagatgagatacacttagaaaaccacatgaaggctccctctaataagcggtcgttcataattttaaaataatttatcaacttcgctaaaagttactctgcaaaatgagtaaaactgttgttcgtagtaacattagtgaatctaaaactgttacaggttgaaattttaaaataataataagaacttggctgttaaatttaattaatgaactataaatggttatataaaaagaatcaaataaaaaaatcgatgaatatagtatttggaaaataaataatttgaaggataatgcttattcgataatccttagtttgaacaaaaaatttgtaaattgtaaaaataaattgtaatcttcaggaagaacatctcgatcatgccttcttgttggaacctatcttattgtcttctggtttcttttggaaaatagtgttatctttttcgtgtctaacctttggaattaatgatgatggatttaatagtttagtaataaaactgaatgggcttttcctagcaactctaaaataataataaccacctaacataaatccaacatttgcaaaaatataaatccatgcaataccaaaatctctccaatgttgactccacttgataccatattgtgcaacaacttgaatttgttcagtatatggacaatacatacaattggaatcttgttctggatttcttaagtaaccaccgttattagtaataaaatcattgaaatattcaccacatgtttgacctgaaggtggatcaacaatacttaactcactatatgcacattcaagttttctaccttctaaaattggggcaacgaatgcttgaacgaaataagtgaatggagatgcaacatacatgaatgaccagaaatgtggggaatatcttttaggattcaaaataccacagaataacaacatggctgcaaataaattagagttgatcatagaagctgatggaacatctggtgaaaaatataagatagctaaaccgtaggtgatatagtataatgggaaaattaagacattaatgaaaaagaagaaacctgccttatttgcatcacctgaatatcttggtggccagtagtaacaaataaaaattaagaattgacaaacggtagaccataaaatttcaacaattgtgtgacataataataaacatgaccagtggaaagtgttggataatgcttctctgacttcaaataattctctagtatcataagcaaaaacatgggattggttgatcatagcaacagaaattaataacaacatgaaaacggatgagaaggcattttgggcaccaccaatggtgtgatccataccgacataagataaaccaacgaataaagcacaagagacacattctaaaaacttagctctaatataaacaggagatctccaaaattgaacgtaagttctttttaaaacaaaccaaaattggtttctgtaggagttagcatatttggcacttaagtcacctgcattggcattaacaggtctttttggtaattcagcatgtaagtaatcaatatccttagtaatttgtgcacattctgatgaattgttccaaagctcagcccaatcttgtgtagcatttgcagttgcaccagcaccaatacaattcaaaatatattctgcaggattttcagatttaccacacttgacaccggagtgatgttcaaaataacttaacatggtggatgagttttcaccaatgtcaccaaaataaactgtcttaccacccttctttaataataataatctgtcaaaaacttcaaacaatgtagctgatggttgatggatggtacataaaatagcttgaccggaatctgcaagggctctcaaaaattgaacaatcgaccatgatgattcagaatccaaacctgaggttggttcatccaagaataataataatgatggcttagcaactaattcagtagcaatggataacttttttctttgttcaacattcaaacctctaccaatcttaccaaccatggcttcggcatatttgtccatacctaaacatccaataatcttttcaacatattcatatttttcagattgtggaacttcctttggttgtcttaaatctgctgcaaatcttaatgattctctaaccgaatactctgccatatgcaaatcttgttgttgaacataacctgttcttctcttgaatgatccatctaatggtctaccattgactaacatgtcaccagtaatggtaccaaatgaaattctttgtgctaaaacgtttaataatgtggtcttacctgcacctgattcacccattaatgctgtcatggtacctggtttaacataaccttgaatggaacataataattgtctggttgcaccgtcatatggaataatgtaatctaagttcttccaggagaaaatatctgcttcggagataatcttatctaaatcagcatttggaccatttaaggcaagcatcatttcttctctagtggcaactttaccatcccaatcttcaccgcctgaagcatctggtaaacatcctctcttaaataaaagcatatcaccaccaccttcaacattcttaatgaattcagacataaaaacattcaaaccaatataaccagcggtccaacaaatgttaataccccagtatttccaaacattgtgccatctaatatcaaaagcgtgatataaataatcatcaccaagaacccaatcttgaccagcgatagaacctggaacactacaaatttgatttgctaaggaagcattttcataacctggacctgatggaataaaaacatcacattgcatgtgtctaccatgaaattcattacccattaatgagtaaagacaataaaacatagggttcaagtaatgaatccatttaatccaatgatgcattttatttaacggcaaaacaaaacctgcataaacacacatcatcaaaatccataaaccaccaagtgcatgggcagtggtaccatctttggtaacagttgcaacacacttgaaagtaaaagacatacattgttgaatagttaataagaacaacaaaaacataaagaaagcaccggcttcatgctttaagttaggcatccagtaggttgtgaaacctaaaatcataacagcaacaaatttagttggaaactcggtaataatttcttgtaatgcttcagcagacaaatggtacatcgaataagacttatgtttagttaaaatatttctagttgaaaacgagttagcaatttcagctaaggatgtgaccgaacaaaaaagcaaaacatagaacaaaataccaccacgagaataagcaccattagttgatttaggaatatgatagtacatggaaccaacaacgaaacctttaacaacgaaagacaaagaataaacaatggtatatgtaatattaccctttgttctttggaaacctcttaacatcaagtaatataattgtgaccaataagtaaccataaattgagagctttgtctattacctttttgttttctttggtgattgacaaattcaagtctttgtcttgtttcttccccattacggttggcattgaattcatccaattgggtcatcaattcggcatattctggtgaactaacccaatattcagcaaattcctcagatgtttctggaaccttaccttcaaaacctggttggacttgtctggatgatggtgatgtaacagcagttaaaaattctggagctgtcattctggatggcttcatgtaacccattctttcaaaatattcaatacccttgtctgcaggaccccagtaaatttgtttacccttgtaaagaacacaaaccttatcaaataactcataaatgttttgaccagcttggtaaatagcaacaaatgcggaacaacccatcatgttggtggcagttcttaaacattgagtgaactctaatgcagtggatgcatctaaacctctagtagcattatcgaaacaataaactgatgcacttaatgataatgcttcaacaatagaaactctctttctttcaccaccggaaacacctctaacgaaatcgttaccaacacgagtagcataagtatgtgttaaaccaaaaacggtacaccataactataataataaaaagggggttgtaatgttagtatttcaattcttgatgaaaataattggattaataaaaaaaatatacttactcttaacatgttatcaacatattcttctctggacatattatcaactctcttttcaggagtcttacatcttaatgctaattgaatggtttccttaacagtgatatatgggaaatggaaatctaattctggattgtaaacaacataacccttgaaatgtttcatcatatgttcttgatctaaaccatcataggaaaaaacaccttcaactttagtgaaattttcaatttcacctgcaacagcttttaataatgatgaacaacctgcacccggtttacctaaacataaaaccatctcaccaggttctaagacaccaacaaagttttcaatgatctttctttggggactattattttttttaaattttttccagaattgaagtaaatcgagacataattcagtgacagatgggccagtagcagctgaagcatcaataccccaacatgtaacatcatggaatgcaacaccggcattagctgattcaataccttgttcagcagatctatcacgtaaatattttaataataattctaaatcaaaattttctttgttaatttcaaagctatccatatctttcttagttttagtagataggactcttgcaagagatgcaacacgatccataccttcttgagttgataaaatacgtgtaacttgctttgataaatttgcagcattttcttgttcttcaggatcatctaacggattaaatttatgaacatcagcagaagagtcaatactgtctgtatcatgactattattctcatgagcttgtttctccattttttaacaattaataaagggaaaatcaataatcagaataaaatgaagttttttttaaaatatagtttttttttggtagattataagttattaattttttttgttgataaaatttattgatagcaaatctaacttgaataaaaattcttcactaaatagaaggatattatatgtgtttgaataactaaagttaaactgtgataaatgaaactttttaaataataaattaggataaagaataaattcaaatagagggacaattgaagtaagaaagacactgataaaatacaaggataaaggaagatatttataaaataaaaagagtttggaataaaaatcggtgaaatggtgaaaaaatacttgtataaccgacattcatgccaatgtaatcaaaaatttaagtaataacaataacaataataataataataataatagtttattatgggagaaaaaattgataataaaaggctagagtaatttacaagtcgtttccacataaagtaacagccttttaatgcaaaaaaaatttttttaaccaccaaggctgtagtttccccacggagatatttataatatgctgtggctatgccatatttcacaagtctctatgttctgtcaaagaataaatacgttttatataaacctatgtttaccggagcctttgtataagtttttagtgggggggtgttagagttaattattgtaagagtgattaatatctgtataatcatcgatggtgtagaaatgaagattaaaaaatactcaccccataaaaaataggctgtgggaactacgtcaaacaaatgcgataaggaagtcggttaaaattaggtaaaactctttgccgatatctctcaatcaacatggtcggttgaagtggcagctattcattagccgatggtatattgtgagacactaaaattccgagaagttaagtgaaaatcgcgaacaaagaaaaaaatgttacgtaatcaatttttacccacggaatttagcttcacattggaaaagtagattatttcaaattaatttttcatcgtgttgaaaatcaaatcaaaataaaaacgcgtcaactttcagtcttgcaaaatgatatcaataagtgacgcgtaattttaatatctttcaggttaaacaccagactgtgtatataaaccatcaatatttcttgctcttgcaacttctttccccatcttacagaatggtatactctgtgtattatctataatatatttttaaattctacaactatcaattcgaatatagaatgtcctgttgttcccgagaaccttcatcctaaaatagtatctcggtttcccctttgggaagtgttattgattctaaaatttcattcgggtaaatttctcttgattgtttagtggtggtgttattttatcatctttgataggccaccttttatatcattggtcttatatatcacaataccttatactttatggagttgaaacgttattattctcgggtttcagtataatttacctttacgtatattctactattacgaatcctattaataaacgtaaatttactacattttacactaggtaagccttaattttataccccctatcaacgtatatcttctccacatcttactactacatttatttaatatctattaacctatatactaagttgtatttaatatgtagcattaagcaaccattttttttttcactttatgaaaccaattttagctgctctttctctcacctcgaaattcatcgcctcttttttctcctctcaattctagggcttattctccattttcgaaagtttcaattgcttctttaactctaatttcctaacttttctttattaacttcgattggaatagcataggtgtatccactctcagatttggtgggttttatttgggatagtcacatataaaagaatcaaaataattaaaaagaagtttatcagctactccttacatcagttgtttataatttttcttataaatttgatacttacactttacatttaaactactatctattttaagttacaacttactgttcattcgttcattattttagtttaatttcaaactaattttttatcaagagtttaaaaatagaagtttcaaaatttcgaaaaaaaaattaattttaaattttaaatcaaagaacacacactccagaggtaaaaagtgaaaagacatttctgactggtcactttttattttatttttattttaagtcctatagtttgtattcattcatttggattatttaactgatcatttcaattgttatcacctttaaccatatcatctaaagaagctaacatcttttaataaaaaaaaaactaccctttcacccttacattcgactaccttttcctacaccaactctcttcagcctcaacccaaactattggattttttttttcatttactggttcatttcagaaaacgatgatgtcttcatctcctccacataatagtaactcaggctataatccatatataccaaataatgattatcaaattacttcatcgccttcatttaatgaaaatttaaatttacaattacaaaatgctgattatgataacaattatcaatatgatgaacaattgaataattatacaactaataataatgataatgatagccgactcaatccaagtatatctgataactcaatcaacttagattataaaggaaaaccaatgtcacaaagaagttcagtttctcacgttgaaggtcaagttcaaggtcaaacacaaaatcaaggtcaattttcaaatatggaaaatgttgatagtgaaactgttcctaactctacaagaaattcaagtatacatcaaataaatcccaatgatgatcaattgagtttgatgaatagttcaaataatcattatcaatataattctaattttatgtcaatgactcctcaatataattcaatgcaagaatctatcaatgatccttcctacaacgattttgttccagcatctattcaatctaattcagataataatttgaactttactgtatcctcgccacatattaatccttcgatgactaattcgactactagttcttctttcaattctttatattattcccatcaagcattatcaaataattcaatttcaagcggctttcaacagcaacaacaacaacaacaaaatgataccccgttacaaccgtcgagaagattatctgtatcaattatgcataatggattaacaacaaccccttccaccactcctctaaggaaacaaaataatttaactcctagattagcacctaattatggacaagtttattcacatagaagatctaaatcaaaattatcaactgataaatcaccaaatactggtaatccattttacaatcctctttcatttttatctccgaaagttcaaaagaaatctcatagaaaaaatatttcaataactaattcaatttctttaacacatttggatactgatttaaatttacaaaacttacataatttaaattacgttggttctcctcgtgaaactcctttaaggacgccaggtaagggtttgataaacaactgttattatggtgatctcgatcctgatgatatggatagtacaattcataataatttagatattgataatattgatgatagaatagatatcacattagatcaaactcttcatgagaaggcagatgaatctgatagttataatgatttatttggttctcatttaagctcgaatttagacaacactttcattgttcctaatattattgaaaaggaaaagtttaacaatcgattggttcaaacttcaaatgatctgaatagagtgcttaaagcaggtggtagtaatgataaaaatgttttaaaaaatgtgagtctaaacgctagagctaatagaaatattgaagataaagttgaaaaagttgataatatgaataaaactaacagacatacaactgattcaattttagattctgtagctagtggttactcaaatatagattatattgatgagttatttccttctgatcaatcgactgtggggtcgttacagccaaatttattatttaatcaaaatcaatcacaaattaacgatagaaatgcaattcataatcaatctcaatcaaatcaacaaaatttagttaataatgatatttttgttgatgatacccaatcaaattttaatcattcctagaaattcttatcaatataaaccaagttcgtcaaatagctcacctgaattacttcaaagctcattacaatatcaattacaatatcagtttaatgaaaagtctatgacaagtttgccatcaccgaatgtagttccaccaacaagatatatgaacacttcatcagtaccacaaactaggcagggatctactattattgattcaaaattacaaagatctagatcatcttttaatttgagtgaaattgcagcatctaaagaatctaagaaatatagtactgattatttagaatcatatgatgaaaattcagagattgatagtaaccttagctcaaatgtgattcctaaatctgcttcattacaagaagttgcagaaaaagcatcatccaaagctaggaaacataatgaatcaaattcatcaaatgataataatataaatgatgaaacaactcacaaaacaatcactagatcacgttctaagtctaaacgtagttcactcaatttagccaatatcaaacatccagagaaattagatttaccacaacaatctgctagatccaaatctagaactaaaaagacaaatcatgatgataaaaaaatacatgagtgtccattatgtcatatgagatttcaaagaccggaacatgttaaaagacatatgttatcacattcttctgagaaaccatttgcttgtcctgaagaaggttgtggtaaaagatttaatagaaatgacaatctgaaacaacatctaagaaatattcataagaaaaagatttgaaatttgtcatttatacaaaacattttgcattaattaatacctttaatctatttagttcttacaatctattttattacatattgtatgtttattattataaaaacaatttattagcattgacaatcccgttaaaacgtaatctgagaaaaataatcatgtatatacgtaaatttgttttaaaaaatcagagtaaactaatgtagatagataacttaaaataatataaaataaagaagagttttagtgaattgaaacttaatagaacgtcatccgaaaaattcactataaaacgtttcttatttgagcttcagctggtgtttcactgacatgaactgttgcgacaacattactttgatggaattcttgacctaatattgcagcacctgcataacaaaaaacattaattgtatataaaatagccaatgcaagtaatgaagtagccatgcaagttaaacttaaccattgaataactgcattaattgcataaaataaagctctcatccaattagtatctaattgttggatgaatgatataagtgaatctggaattctaaaaatcttcaagagaaatggaatctcaactaatgctaatataggactttgaacaattgcaataataccgaatatgaaaacaacattaatatgaaataaatttgcaatacctaaagctaatgataaaaatatacatgtaataccaatccattgaccataaagacttaaatttctggatttcatgtcttgtaaaaagccggatattttaaaataatctgtaattgccattgattttgttgattattgtatgtttagagagtaaatctgataagaacaaggtggcttgttctgcataattcaatttgtgaaaagggttattaaattttaatctgtaagcacaataaaaaattatcattcaattttcatgattaggtaatcttttttgttccacatgttggttttattggcaggctactggatcagatcatcgttatatgttgggctacttcttattctgaatatttgaatacatcaaagacacattttcacattttatgcagctatgagtgaaacatcagctttgaagtgaagatgtttttgtacgggatactttgattgatgtgaataaggttgataataaggtgaatatttcaaataatggctcgaacattgttagatcaaaatctaagaaagcagaagagcataatggtaatttggatgatgatgattccgataatgatgatgatgatgataatgatgaaataacaaaatctttagaaagaattggtgttactattccctctttcatgatgccaagaatagacttgccaagcccaacatcagtttctaaaagaatcaatgattacttggttcatagtgtgagcatggaaaattcatcaagtagtaacattaaagagctattaactgaactgtttaataaaaggacatcagatttgaaaaatctttatactgaggtcagtgattccttaactggaattgttaatactaatattgatcatccaattgatgaatatattgatgaacttcaaattgatgatgataatagtgaaagacatacagaagaagacattattaacaaaaagaagagtgtagaatctaaaaaatacaaagaattagaaaaatatgaacacttaacatacttgacatttgaccaatttcaagaccaaaagtttttgaggcatcgtataaagcaaatattaagccttgaaatagatcctgttttacagagattgttgattcaaaaattaatgtcaagatcatatatagagaaacaaaatcatattaagcaacaattaaaagcgaatgctgagaataagactgctcagaatataaatggtcaaaatgaatatgatagtgctggtgatagtgatgatgaaagtgatgatgatatggaggatgatgaagtttttcttacagcaaaagatagaactgctacatactactccctggaagaagatattctcggttgccaacattatcaaagaaattgtaaagttgaatgttcaatttgtcacaaatggtacccatgtaggttttgtcatgatgaagtacaaacacatcatttgaaaagagaaaaaataaagttcatattatgtatgttttgttttgaacctcaacatcctcaacaatactgtgtgcattgtaataaagaattgagtaagtactattgtgacaagtgcatactctatgacaatgatccaatgaagaatatctaccattgtgataaatgtggaatttgtagacttggaatggggttaaatcaagactactttcattgtgattcatgtaatgcatgtatatctattgacttgcaaaaaaatcatgtctgtattgaaaattcaacaaaatcaaattgtccaatatgtgatgaatttatgtttaattcaaatgaaaaagttgttttcatgacatgtgggcacccaattcatgataaatgttataagcagcataccttacattcttataaatgtccaacttgctctaaaactattactaatatggaactacaatttcgaatgagagatgcagaaataaagcaaagtaaaatgccagaagaaattaaaaactgggaaacggagattaagtgtaacgattgtggaggtatgagtagagtcccgtttcattaccttggtcataaatgtgatttttgtcatagttataacacaatgcaagtgaaattgattaaagataacaatgtcgaggtgatacctgatgataacgttggtaacaacagtaaaaacaatcccaagctccatagatcggatactgatcaactttacgttgccgaaaaatttgtcactaactcattaaatcaaaactttgaatttgatcaagaaaggaaaactgatagaacagtattaaaggaaatggtatcatttgatgaaattgatcaatcaattgatcacaattacgtagataattttattaaagttataaataattttgaagcttactcctcaattggcgatgcctttaaagactggataagtatttctcttataaataatgttagtgatgatgatgataatgaaattaatggtatggataatggtaatgacaaaaatagacgtaatgaaaactaattttaattgaattttatatagcttttgtacttagagattaatgatattacaataatattgatttaaagacttaatcaatcaagagtattacgtaatttagtatgactaaaaagcttgttgtgatatatattcttatgaccttttatgcaagctgctatgcaaaaataagagcaggttgcccattagtataattgaacaatctaattcaccaataaacataaatgtttgtgtagagctgggttaaaaaagaactaaaactatggaataaaaggccaaaaaaactaaagctgagccgcctaaaaagaagaaaacgtacattttatgaaatatcaatatgagtttataaaacttataattttttattcataaagtaattatcaattaacctaaaagctgatatttcagaaagcaataaaataggctattattatcttgaatattttaagtactataaataaaatataaaggtaaaactatacaactaattgtaatttaggtattatgacgtactctggaacttaaaataggtatacttaagagcttacttatttttgaagagtcagaggagttaataggggtgtttggatttgacattgaattatggtgaatactatgattatccattaatggagtctttggtccactataaaacgtactcgtaggagaatctattagattttcttgagatgaattgttaattatatttcctagcttagtatcaagtttcaaacgatcaacgttcttgagtttaagatcttgtagttttgatgatgcttcttcagcctgtgaagacagtgaatatattgtattagatctactattaagttgcagttgtcgtggtgttggacaacccgacttgatgaattgtaaatctgaagcttgttggattatttggggatctggtttaacaggtgatatatctgatagttgggaattggatctaaacgttcggctagatagtgatgatcgcttagagtttggcgagtcattagcaatagaatgacttccaatagttccttttctaggtgacacaatttgagtagttgcagatggatttgtacctggctgtatatatcttctgttattattggagaagctaaaatcctgctgctgtggagttgcaacttgctgtgatggaaatgcttgcggttgctgttgtgatatttgaggtactgttgttggagtttgtgatgcattagatgttttacgtaaagataatttataaccattcgatgatggtgaagaagctcttgaattccgagatgatgccgcagagagtgaacgtgaaattggtaaaaaaagatcatcaccttgatcaccaaaaccattattggtgtattcatactcatccgagatcattgaagaaagcgaatattttcttgattgaattgaaggtaacttaattcttggttgatggctctgaagtgggaaatgtagcattaacaggcgataagaacgagatgttgcttacattattcttgtttgccttgcttgacgcatactttgttatgggtatttcaatttgggtattttccaatgaagctaatgttgaaggatgtgattttaatgaattatacttttgaattatgttattatcaaatgcaacatcagcaggtttccaaccagcattattgaaaagttgatcatcagcgttatatttgatcaaaaattcaatacattttaaattgttaaactgaaaagctttatgtaacggtgtatcaccttcattatcttgtaaatttggatatgctttgttttctaacaaaattgccaaacaatcagagttacccttaatacaacaaatatgagaaggagtcaaaccatttatatcacgttgatcttgacaaacgttaaagtaagataataataatagtaaagtagcagcagagtcaccagcacatgcaatatgtagaactgtttcttttttaaatgttaatttaatttcatcttcgtcagtaatttgggtatataatgaatcatctggattttttgtgacttgtgatgaaaagtttcgtagagtgcaattattgatagaactaataaatctatcatgaattaatcccaataacaattccgcaatttgaaagtggttatggaatgaagcataatgaagatttgaccaaccattggacgaatccacgttatccaacagatccgggtatttttttaacaaccttgaaacaacgaaatagttgtcatcaatgatggctgtacgtaaacgattgctgggtgccgacatctatgtctgctttattattctgtgttaaatatatatatatatatttaacgcctttagtattgcgcttaggatctttcggaaggaagaagctttggtgtgtgtactccagttttctatgttctacagctaaataatatttttcctctttccacaatacaatgtgcaccaaaattcgccaatttcaaactttttttctatggaaggaaagattttcccgaattgtgccattattttaaagtcatgtcatcacattattacaggattctttcatgtcattgttattttaaactatactttgatattgtcgaatatataagatatacacaaaataataataaactgctatctaagataaatataagaaggacggaatagatctttattttttatgtgtttttcactgtctctaaaatcattttggagatggcaagacatttttcttcttcggttttacgacatatcacttgtaaacaaacaggcattttatcaaaatcttgaggaatatactgcttgcggatagctgcttcaagctcagatcttaccggcctttcctctaaaacatcaattgtcgcatcaacagtgcctaaaggcaaaacaacaccaacagaatcacataaattacaaaccccagtgtattctaaacaaacagcactatgtggttttgtcgatggactagtcatgacaggggctaaaactgcatctagttgattatcatcccaaaacttcaaatatttttgtttgatcaaataaacttcctggcataagtcccaccattcattaattgtaagtggagcttttaaattatcggaatcaactaaataaccaagtagttcatgaattggttcacccgattttgcacattcatcaataatttctttacctgcatcagcaccaaatactgccattaatgcattgattaatcttttatgctccggccattcaacttctacaacttctaatttagcgtcaccctttaaaagttttgatacctgattcaaaactcttttgataggtggtaatggctcaacattaccactgtctctccaaacaccaatctttattgtatctttatcaaacttaacattttccttccattcgattggtaaaaccttagggtcatgtaaccaacacttagtttcaacaacagctttcatgatgaattcaatttcttctaatgtttttcctaagggaccaataactgatggaatagattcttgtgcttcatatgaattactaactcttaaataagatactctgccaatactcggtttcattgcaaagagtccattataagttgctggaattctgatactgccaccaatatcagtaccaaaaccaatacgtgcaccacctgctgcaattaatgacccctcacctccggatgatccaccagaggataaattaatgtttgctgcactataagtgtagggatataagttagattcagtttctggtgccatcattgccattggaacacatgttttaacaaataagatggcgcccaattcaattaatttgtctgctagtaatgcattttctttcatcttaacattagccaaggaaacataaccaatggaagatggaattcctttaagatcaacttgatcttttaaagatactggaattccatgtaaaatcccaacagtttttccgttcttttgaaactccaaatcaagttctttggctttcattaatgcctctttgacgaaaatttcagagcagcagtttaaaatttgatgtgctaacattgctctatggcagaatgcataagtaacatcataagcactcaattgacctttaccaattaacaaagatagttccataattgttttgcctgtaattgcaatctcattttttggtaagattgtgtctaggtaatcacttgtattgagaaatcctttcttaatcatatcatctttgagattagcatctaaccattgtgagggaatactttcttttaaagcatttcttttttgctcaacaatgtatttccaactttctgccattttctgtttgataaatataaaaaagttctatatagaaaaggggagtgattacagtcataaaacgtctaatggttacagtataaaaaatcatataaaaaatcatataaaaaatcatataaaaaatcaatcttatctacttcggctattttcgataagaagttgcgcacgagagcttaagctcaagatgatgatacaatcaaagatagagccatggatttaactttccctaatccagagtaatagataacagaaatcagtaattttgtgaagatatcttgtttatcagttgtgaaataccccttatcggagagataagaaccgataacgtcactaaaaaattaccagaaaagggtttactctcgcccaaaatattttgacacattttaaagtttcaaattatcgctgaagttggaatgtctgccgacattgataagaatgaaatgctctgataatttttcacctctcgtatactatatttattgataagatatatttaaagcaccaacgggaattgttttttgcaaaagaaaagaattgaaaaacttttttaaatatttttataagcatacaaaaaaaatgccagactttcacccaattctaactcaaggttatggttatggatatgctcttggaattggtgccgcatttgcattattaatggcatgtttaactaaaattctatcagtgtatatgggacaagttcaaaattccgaaagattttcaacagcatcaagaaatgttagctcagggttaattgcatcatctacagtttctgcatggacatggccagcaacattactaacatctggtgcatggagttatacatatggtatttcaggtggatttttatatggtgtcggtggtacagtccaaattacattatttttattcttagctttacaaataaaattaaaggcaccaagtgcacatacagtttctgaatgtttttcaattagatttggtaaaactggtcattgggtttatttatgctattgtatatgtacaaatgttttaatttcctcattattgttgttaggtggatcacaaggatttgcagcaactacaggaatgcatgttgttgcagcgagcttccttttaccattaggtgtcatggcatatacagcattaggtggattaaaggcaactttcatttctgattggattcatacagttataatctatatgattttgattgtaacgatgtatacaatctattgttcatcatcattgattggatcaccatcaaaaatgtataatttattaaaggaagttcaagaagtttttccatgtgtttcaggcccaagttatttatcattccataattctgagatgttgtttttaacatggtcagttatgttaggtggtatgagttcagttttcggtgatccaggttattcccagagagcaattgcatctgatgctaaaagtgttttttgggggtatttgatgggtggtatttgttggtggattattccaatgggattaggatcaagtgcaggattagcttgtagagcattattaaccaatccaagttttgttacatatccaaatgaattaagttctgaagaagttggttcaggtatgccagttatttatggtatgtttatgatttttggtaaaagtggtgcagcagcgggattattgatgttgtttatgtcagttacatcagcatcatcagcagaattaattgcatttgcatcagtttcaacatatgatatttttagaatttatattaaaccaactgcaagcggtaaagaattggttagagtttcacacttatcagttttcggatttagtttattaatggcagttttatcaattgttttcaattatattggagttacagtaggatggctattaagttttattggtattataatatcaccagaagttggggcagttacattgatgttattttggccaaaaatgactaaattatcattaataattggagcaccactaggtacattaacaggtattggatgttgggttggtagtacatatgtttatggaggtcacataattaataaagatacattaatgacatcaaaggcaacatttattggtaatgtaacagcaatttttagtgcaccaatttatatgataattataagttacttgaaacctgatgaaacaccatttgatttaagtttattaggtaaagatattacattagcagatgattatgataaagaggaagaaattgcaattcatattaccaaagaagatgaaaaaatattgaaaagacaaagattatattcaattttatttaattttttcatacttttactagtctatgttatgattgtctgtattttatatggggttaataaagacttcagtgaatcatcatttacaggatttattgttgtatgtttgatttgggttttattagcagcagtttacatcatatttttaccattatatcaaggacgtcattcattaaaatatgtgattagtcatttaattagatttcaagttccagagaaagaatcatcatcatttaagacaggtgaaagtgctgagccgagcgttgaaaatatttccttaatagcgggagatgataaaaattctagttaattacgtaatacaaattgtataatataaatagtaataattaaatttaattcagcacgcttacgtaacccatatagataacacggaggaatggagtccgaataaaataatagttgataatttatgatttatcccgggaacgcgccgttttctgtgccggtagtaaccatttcgtggggaaattgagtttattttcttttccatacatgcaattctcgttactgataatctccgggatgtcaaattgaaaatttaacttctcgatttcttcatgggctctcccactgtatacaggccggataagtcttccttcccccccacaattatgattcaaggatcgggcagacggcggacgcgaaaatcatttgattggctcacagagtgagaaaattacttaatcagtaaagttttgcgagattttatcattgattgtataaatagagagtagggtcccatcatttaatgacttgaaaagttattattttaaattgtatttgcatatttgatttttcttaattaccttttctaaaagagtaagcaataacattacaatgtcttctgcatctcaaaaatcaaatcaaaagccaaagagtgccgttattgatttaattgctggtggtacagcaggtttatttgaagccttatgttgtcatccattagatacaattaaagtcagaatgcaattatataaaaaagcagctggttcaactgcaaaggcaccaggtttattcaaaactggttataatatttttgcacaagaaggtttctttgctttatataaaggtttaagtgccgtttgtattggtattgttccaaagatggcaattagattttcatcttatggattttatagatctttattcactgatgaaaagggtaatatttcaggtcctttaacttttgtctctggtgttatggccggtgttactgaagcatgtattgtcgttaatcctatggaagttgttaaaattagaatgcaagcacaaaataattcattaaaagatccattagcaaaaccaaaatatacaagtgctccacaagcagctgttttaattgttagagaagaaggtttaaaaactttatggagaggtgttgctttgactgctggtagacaagcaattaaccaaggtgctaattttacaacttattcatttttaaaatcaagattacaagatgctcaaaatagtgaagttttaccaacttatcaaactgctgttattggtttcatttctggtgcaattggtccattctgtaataatcctttagatactattaaaactagaatgcaaaaggaaactgcaattacaactgaatctaatttaagtagaggtttaagaattggtaaaaatttagttaaagaatctggtatttctgcattttataaaggtatcattccaagagttattagagttgcttcaggtcaatgtgtcgttttcccagtttatgaattctttaaaggtttccttatatgatgttgcaggttataatactgaaaagaaattaaaataatcttgatgatatattataatagctcatctatttatcattaaagttattcttttctaattatttattcatttccaatttcattatataatatccaaaaaaactcaagtatagactattatttattaatatattcccttccaattagctttcatctgtccttttcatgattgtgtaaatgttttataaatctagaaataaaatcaaaaaaaagtttgaaaaatattacgtacagggaatatagtaaattgtaaacttaagcgtataaagctacaacatgaaaattacaattacagtctacaaatctttctttacatgtaaaatcttatattcgaacatttcaagtgtgatattatgatattaaattttagagaatttagatgagttcaatagttcatgatactattactatctttttaatctcattttaataaaaatatatcatcaaacttgaaaacatttaatttttgatcttttttgttctttttattaatggaaatgatacatagtattgatataactcgataaatgaaattttaaattatttaaattaataaattttaatttaatgcaactgttaatttaatcgaataaaccgaaacccatatcatcatcagattcttctttttcttcttcaacttcttcagctgctgcttcttcagaagcacctgcaccagaaccggaagctgctgcaccagatgctggagctgctgctgccatagagaataagatttcctttaaatctttaccttctaaagcttttgcgaaaactgaagtccagatggattcaactgatgcacctgctgcggttaaaacagtttgtaagttttcagaggtaatttccttttctgcatcagctaaaattaaagctgcgtatgaaacaagtgcgtcagacattatattgattcttgttaaatgaaaagttaatagaaagtaatcaatattaatgatattatagattatgatattatttcagtaataggtaatagtaaattttcgacatattcatcctctatcgcgattcttgaaaaatttcattaaattattatgataaaaaagtaaggtggtgcgaggggcttattccaaaattagtatctgtgacggctaaaagtactctaaaatttacattttattggattacttaataaaataaaaaacacttcacgtgacaacgcggctcgtcactcctatatcaatatttttatttttgatgtaataccttatgataacacaaagtatttaattgtataccattgaaacaaagttttattgtaacgtaaattctgtatataatcggctatttaaatactaactacttattatcattattcagtaacatgatatattatatacaggagtaagtttaagtttaagtgataacctattattcgaatcaataattcacttgaatacaaacttaattagtgaattttttgaaattctctaaccagtcaagatattcattattttccttaacaccagaatatgctaaaatgaattcagctaaaccttgatcaacacctcttgaaactaaatattgattaacagcttcttgtaattcttctgcaagattagagaattctggacctgaatatttaagatctctttgagctgcagcttctggtgagtcacttaatgcaatttgtgcatcttcaaaattagtaattgcagtgactgaaaaggatgaatcaattaatgataatgaaacatcaaagccagttgctttgttatctttagcaacaacaacattaacatcaacatgagctaattctgaaacttcatcttctaaatattcagattgttcaagttgttcttgcatttgctttaattgcattgaagtttgagaaattcttaaaacatcaaagtaaatatgaactttttcagtttcattaacagttttaactaattctgctaaaactttaccatcagtgttaataatttcaattttattttcttctaagtaagttttaaaagtttcatctaaaccaaatgcatcagcttcttcatattttaattcttgagcaagaacttcatttaattgtgtttttgcttggttgttaacatttaatgaagttgagaacttagcaacagaaactcttggaattattgttttagtaatttgagttttgaatgcagctgatctgattgcagttctaagagtttgtgcgagtaatcttgatgacattttgttatttacacttgtttaacgagttataaatgtaagttttaaatgtgatggcaaaaggagggttaacagggaaataaatttctattattattattgaatacaaaattcctgtctcaatttattgattgatttttttgacatgcaaaattccgcggaaaattaaacaatcttattattactataactgtgttctacagatttccatatggtatagtacaataattcagaataatatgatcatgaataaaatttttatgctctatttatataaagactttatttatggatggatatatgcataatgacattagaaaaatggtgctaaaataaagcaaaaaggtggaaatgtagtaacgaatttttccactactaaaaacaatgataagaattagttttaaaatgaaattggaatagtatatattatcttttctcatctaatttaaacaactttttgagattttcatacattagataactgattgaaactgcgggtattactttagctaaatttggtaccaatcctttgaataaaccttgaataccttctctttgaacagtttgtttgaaaacatcggtaaaacctgtataagtatatggatgtgcataagtaccttgagcttgtaatctagttcttaataaattaattggataaaccattgttgcaccaaatgtacctgatgatgctccaattgataaaacaatataatttggtaattgaacatcatcaactgaacaatttaattgtgcagcttgtgttttaatataccattttttaacagttgtaaaagtacctaaatctaatgcagcatatggaaacataccacttaaaccaactattaaacctctataaaatactcgaattccaccttccttatataaatctgaagctgttctaaacagtaattttgtacctttaattttagaatctaatgaagcacattgtaatctatatttaagtgtatcaattggataaacagttgtttgtgctaaaacaccaccaataccaccactcaaataagttgaaaattttgataattttttttcatcatcaacaccttcaagttgacacataattttctttgttgcttcaaatgaaccaaatttcattgcactttctggaaaaacttttattacatttaatccattaccaacataaaatgctttaattccaccttgtttataaatagttttaattgatctaactaatggagattcaattttttgaggttcaatttttttatgtctaatttcttcaatttgatgtattagattatttttattcttcaatagagttgatgataaatcagttcttgcaataaggaaaactttaattctatctaatggtgcagtacaagttcttgaaacaacacctgataacccacctgctaaaaagtatccaacactattcaatatatcatcaccaactgtaacatcaccttctgaagataaattatctaaatcatcgttaaaaaatttatatgcagttcttattcttgaaccatcaagtcttggcatgaataacaaactatccctaaaagttgagtaagttatataacctttcttttcaacatcaagattttgaaagaaatttttcatttcttcaggagcaggtttacatcctatattagataaataatttgagacatcatcaggtgtaattttaccatcattatctttatcaacattatgaaaacctttttctatttgtgattctgctgtcattaagtatttattaaatttatcaaaatcaattcttctatgtcgattccaaaaaggtccctttttagaattattcgagaatgatctatatatttcttccattgcaaatggtgaatccttcaatggatgatttgattctttcattgcatcttgaaattctttaaatgtaacataccctgtatgcttcttatcaattgattcaaaaatctgttgatgtcttttccttttatcatcaggtgattcatttggaaacatttttctatttggatataaattgtttgttttgatcttagattagctgtattttatataaaatttaacgttattattataatgctcattaacgatcaaattatgatgcaaataattgtacaatgtagatttatatttgagatttcaatgatgaattgccgtccctttctctttctctttctctttcacgattgcttaaaagtttcagaaaaaaaatattattgacaattgataggattatcaggtataaatttgaaatatttctattggatatttaaaatgcaattaactaaattagctgagatgtaatactattaccacggtaaaccaatcttcactttttgaaaagctaacttttccaaattgagtgatatatcaaatcaaagattaaagaaatatttataccttaaacttgaagtgaacatagtaaaaaaaaactctttattgtaataatttgctgggtgcagttccttaaaatttctcgtgaaaaaatagacgcgacgtcactgtttcccactattttaagtattttttttcagcttctcatgaatttggtgttctaaagtgcatgaagttagaattcataagattatattgattattataatatagaaaggtgtctttactgctgattccggtttttaattaacatctactcacgggaagacaatataaagtagtaacataatgtctgttaatatttttggtgatcaagttacagaggaaagagcagaaaatgccagactttcatcattcgttggtgcaattgcagttggtgatttagttaaatcaactttaggtccaaagggtatggataaattacttacttcagcatctacaggtgaatctatggttacaaatgatggtgctactattttgaaaatctattccatttgataatcctgctgcaaaagttttagtaaatattgctaaagttcaagatgatgaagttggtgatggtacaacatcagttacagttttatcagctgaattgttaagagaagctgaaaaattagttgatcaaaaaattcatcctcaaacaattattgaaggttatagaattgcctctaaagttgcattagcaaaattagaatcattagctgtcgataattcaaaagattctgaaaaatttagacaagatcttataaatattgctaaaactactttatcatctaaagttctttctcaagataaagaatattttgctaaattagcagttgatgcaatactgagattaaaaggttcaactaatttagatcatatacaaattattaaaaaagttggtggtaaattatcagattctttccttgatgaaggtttcattttagataaaagatttggtgttagtcaacctaaaaaattagaaaatgctaaaatattaattgcaaatactccaatggatacagataaagttaaagtttttggtgctaaatttaaagttgattcaacaagtaaattagctgaattagaaaaagctgaaagagaaaagatgaaacaaaaagttgaaaaaattaaaaattttgatataaactgttttgtgaatagacaattaatttatgattggccagaacaattattcacagattcaggaataaattcaattgaacatgcagattttgatggtgttgaaagattagcattggttacaggtggtgaagttgtttcaacttttgataatccagaaaatgttaaacttggtcattgtgatcttattgaagaaattattattggtgaagatataatgactaaattttccggtgttgcaaagggtgaagcttgtactatagttttaagaggtgcaactgaacaactgttagatgaatctgaaagatcattacatgatgcattatccgttttatcacaaacaactgtagagactagaactgttcttggtggtggatgttcagaaattaatatgtcaaaagctgtagatcaagcagctcaaaatgaaggtggtaaaaaatctttagcaatagaagcatttggtagagctttaagacaattaccaaccattttagctgataatgcaggttttgactcaagtgaattagttaccagattaagatcttctgtatataatggtttaataacttcaggtttggatttaaataatggtgatgttgcggatatgaaagaattaggtatcgttgaaagttataaacttaaatatgccgttgtttcatccgcttctgaagctgctgaagtcttactaagagttgataatatcataagagcaaaaccaagaactgctgatagaaacatgcattgattgaatcagttagtaattaaaaaaatcattctataatagtgttatcaaaaaaattttttttgtagattaattaattagtttaataaattagtaacgaaataaagttcatttttagttttgatagttattctttatataacagggatagacaataagttaaaatatattaaaaggcatgtacatatatatatacatattatagtgtaaataggaatagaatgttgagatgatggatttaaaagttcaaatcttcgttgattttgaagtttcttcatgatgttcatcatctgtttcgtcttctaattcaaaatgatcaccattatcagcggattttaacttttctttttcttttctcaattgttcatctaaatccttttggccatcatcaaacgtatcaggtatttgatttgaatcatcaaatggatttttagaatgatctcctatggtactattaggatcttcaaatggattagcattatttgttgtagttgtttcaaaacttcttaaatcgtcaaactcaaagtcgttatcatattgttgttcaagatcaattgtttcattggtaggaattgcattgcttgctgaagttggaacttgagtagatgcagctaaaagatatgaagtatcagtaggtctccaaataaccgcaataccaatgaaaacaacaaagtaaacacacgatggccagaaggtgactaaaacatcattaaatttccagaatttctcaattgattctgataaattatcattaaaaatcaaaatggttgagataataaatgcaaataaaagtaataaaacacttccaacaataagtctaaataatttttgatacatttttaatttaactatttgtttattttgtaaaagcatttcagtagtttgctttaatgatgttataatccacaagtataatccaataaagataattgaaagtggaatggtaaaaagtaagattatccatgaatctgaatcaatagagtctgatgctttagatgtatcagtggtagaggcagttggctgtgattgcatagtgttatatgataaccacgcaacaccaacggagaaaataaaatggagtccacacataattttacatccattcattaactttcttggtaatttaggataaacaataccataacctagtgaaataatcaacaataaaaataatgagaatgaaattttgaatgcattcaaaatactaatgaaaacaatataaaattggattccaccaggtagtggatatgtcttattattgtttttaatctcgtataatgaccatgttaatatatcttcaatagttaagaaaacaaaaaaaccagctaaatatttttgtaataatagtaactcagatctgtgcttgaaaattgggaataaatatactgataagcaaactgcatatacaacagctaataaaccatataatgataaaagtgggatttctgatgctggtaagttaccaaatgcattatggaaattaacaatcatattaaaattgttgaattcacctgtatatggcggattgaccgcagcaatacaataataaccagtttcactaacagcataactaaagtcattggtacccaattcagttaaaactgtggttttaacaggcgcaaaagttgtgacttcctcatcaataatgaattgatttaattgactttcaaagcataaattttgagagattaaatcttctgtacagatgtatcttctaacaccatctttatcaacaactcctaataaatcaacatctttgtactcaaatataatgactgaaattccagccttttccagtagctggattttcataagcaaaatcttttagatcaactttaatgaatggttcaacgggtccaccccaatcaactttactgtacatacctgtacaatactcagcggatttgccactgatcttgattttttgagcagataccgagcagattgtacaaaaagtgtacaatagcacaaatattctagatatgatgttcatctggatatattatttatactgaatcaaattatgatataaatcccgggttatccaatgaagatttagtttcgaaaatagaccaagaagaaaaaactgaatcaattgtgtaaacagcttatatagaccttgggtaaattacatttagaactccattaatttattacgcaatctatggacaatatcgctcctcagaaaattctaaagttgacatgaattagctattagtttttctctacattattattattaatcatttgaacctttagtatttctagaataaattatagtggggttttcttctacttttagcttcagatattatattgtctctaagtaacaatgctgagtgtacaatcaagaagaatttttaaccgttgctcggtcaggaagttgtctagtgcagtcgaatcaaaatatttaaaaaaatatcctataggttcagagattagtggttataaaattgaaagacttgaacaagtccctgaatttaatttagttgcagttggtttagaacatcagaaaacaggctcaaaacatttacatatagatagacaagataataacaacgtttttagtataatttttaaaacaaatacaccaaacaatacaggtttgcctcacattctcgaacatacaacattatgtggatcagagaaatatcctgttagagatccattttttaagatgctgaatagaagtttatctaacttcatgaacgctatgacaggtcatgattatactttttatccattttcaaccacaaatgtcaaagattttaacaatttgatgaatatttatcttgatgctactctccacccattattaacctccgaagatttttatcaagaaggttggagattagaaaatgaatccacaaaggacaaaaattccccccttacttttaaaggtgttgtttataatgaaatgaagggtcaagtttctgattcttcatattatttctggatcaaatttcaagaagcaatctacccctctttgaataactcaggaggtgatccatctaaaataacagatctctctcattctgatttgattgaattccattcttcacgttatcatccatcaaattcaagaacttttacttatggtaatatcccattaaaggatcatttagaaaaactcgataaggcatttattccattcggtaaaagaccaaccaaaaatgttttaaaacaacctattgattacacagaaaatgtagatactatagtcaaaggtcctgttgatccaatgttacctttagatgaacaatataagacttcattaacttggaaagctggtgtaccaacagatatttatgaaactttccttgtcaaaatggcatcatctttattaatggacggccattcatcaccactttatcaagaattaattgaatctggttatggtaatgatttttctgtcaattcaggctcagattcaattactgcagttaatttatttacaattggtttaaatggtttgacaaaggaaaaagctgaaaatttacaagaaaaagtttatgaaattttaagaaatgttaagaatgatggattcccagatatcaaagttcaagctcttattcatcaaatggaacttagtaaaaaagtcgaaaattcttctttcggtatgaacatattaagctcattggttccaaattgggtaagtaatgttgatccaatggattctttgaaatgggatgatattattaccagattcaagattgaatatgctaaaaagggtgatgctttattcaaagaagttttagacaaatatattattgataagccatattttaaatatacaatggaaccaaatgagaattttgctaatgaggttaaagaggaagaagaaactagattgaagaagaaaattgagacactttcagaagaagataaacaaactgtttatgatcgtggtttgaaattacttgaaaagcaagaagaacaagaagatttgtcatgtttacccactgttcatgttagtgatattgctagggaagttccatttttgagaatcaataacaaatacgacaatggtgttccaattcaatcaagattatcaccaaaaaccaatggtttatcatatttcaagggtttgaaaactattaaatcatctgaattaactgaggatttaatcccatatttaccattattttcaagttgtttaactaatcttggtactactagtaagtcaatggctgaccttgaaaatgaaattaagttatacactggtggattatcagctaatttctttacacatgcatccgcacatgatcctaatgaggtttatttgaaatttggaattggtggtgttagtttaaattcagattttaagaagatgttgtcattatgggaacaacttttacttgataccaattttgataatatcgcaaaattgagtacattaattaaatcatacactgctgataacttaagtgatattgttagtagtggccatagttatgctagatctgcagccatctccaagatttctaatgttggtaaggttcaggaactattaggtggtattgaaaacatcaaatttatgaatgaaattgccaagtttgaatcgaacggtacattaaaggaaaatgttatacctcaactaaaaaagattcaagaaattctccttaacagttcaggattacagtataatattacaacttctaaggatgctatcaaagaacaagaaagcgaaattttgaaattttccgacagagttaacttcaaacaaccatttagcaaaaattcttatgatttagggaagataaatactgaaaatttgaagaatgaatttgtcaaaattccatcgcatgtgggattttcatcagctgctttgaacactgcaagctatagttccaaagattctgcttcattacaaattctttcccaattattatcattccgttatttacatagtgaaattcgtgaaaagggtggtgcctatggtggtggtgcaagcttagacgcattaaacggtgttttctcattttattcatacagagacccaaagccatttaattcactaaatgtttatgacaaatcagtccctaataattcaattaatattaaaaatgaaaagataacagaggaagatctggaacaagcaaaacttacaattttccaaagaattgaagcaccaaagagtgtcagagatgatggtatgagtttatttaattacgatattgatgatgaattaaaacaagaacgtagatatgaactcttagatgcaacactggaagatgttttagaggtaagtgataaatatttcaaagatgatacaattaaaagtcgtgtagtgattggacacgatactgaagatattaaagattcatctgattgggtaattaatgaactgagttagtttggtaaacgaattttttttcctgctgtacatagactgttattaaattcagatgtagataccatatttaagtccctgacatctttattttgtatataaaaaaaattagaattaagctttgaaaaactgcattaaaggaagatagaattttaaagaagttagtatctgctgataacctaaataatatataatatatgctgaatacgtattatgtatgaaatcattgtaactatcgataagtgttttaagtgatcaaccacaaaacctggcaaaaaaatgctttttcttccgagtggttaagttaatgtgtaaaatattttttaatgttgaaacaatgtagtatagtagcaaaacaaatggacaagtttttggcttaaaccgttgttcatattaacggttttttgacataaaacattggcacagaattaaaatcgattccagtttaaaaaaaaactagtattgagcaatcaaaaaattcataaaaatagtagatccaggccttaattttattattgttcggaaagatgaacaaggttgtaatcgggacttgttttgaaataatatgatttgagatcgaggccataatataaatagatcctgacatattaaaatcatgaaaagcaggtatgcataaatcgcggtgacttgaataaaataaatccgaagaactttagagaagaataagagttgcaacggataaccccagagaatcttcttagttcacttatatcttacaatttctaaacataaacttccaattgtaaaagatgacaatgtactataagcttatagaatatcttatttgaatagaggggctcaataaccgaactaccgactaaccttgataccaaacaataagttgaagcgatgacaacggaagaagctaattccagtaattattttttaactaaatcttgaaggtaatgtacgtttcttatatctgtttaacaaatggctaaaggtgtgttaaactgtaaaaagaaacagtaataaaatttcgaaaaatgtaccatttgcccttaattataattggctgattataaattttgtaccgctaaagaatttgccggggtaattttttctggcggagaagcccgacaagttatttaaatttctctttagagaacttcaagccttgttttggttacactatgaccttatattaggttattggacagagcaactgttgattacagtaaattgaatactagatgttgtatattgaactattaatcatgttagtactttatgtcacattcaatgaaagaaaaggatttatttactagtcagaatgtagtattttcttaagaaattgaaagggttaacaggggtgaaaagtccatagaacaaacttataatttattaatatttcaatgcaaggaaaactataaaattcaaaaaagaaggctcaaaatgaaatctaacgtgtcaaacagctgcacaatagtattaaaaatttttttcgtccactaatgctgcataattttttggaaaaactgttttattcatgcattaaaaaaataaaaaattcaataatcgcgctaaaaaaacggtcactggaaaaacttccatttcttccataaaagcgaagatgttcgccctttttccatacaacttatcttttcacctagtccttgatttaaatcaattttcttttcgttcaccaggaaactaatactaatataacaatacttaataaaatgaatttcacatacaacttttttgttttattcataatggcttttttacaatgtactaatgctgctgttattaatgtagcagcagcaattgttggtggtcacaacaacgcaattgaatcaataaatattcaaccaatcaaagcaatcactgcaggtgaagttattccatcttcaacatttgtacaatcagtatcagctactgctactgcaattacatctgccagctcagctccttctgcttcatcttctgcttcaaatgtttcaattgcttcagatgcagaatttgcaaatggttcttcacattacacaatcaacaataacttgcttattatttcaggtgttgtatcatgtgcacttttactttgaaatagtccccttttacgattataccaaatgtacgacattacattcatttatagagaaaaattattttatagacaaaatttttcaatcaattttatagacatttatagacatttatagagattaattttaatcatatccatactagctatcacaaatgtaaacacaattctgctcatcacattataattgataaataattattgtattgatttaaattacctagattacctaaattacctaaaattagtacaaaaaatttggattttgcgttagaggaaaattacgagttttattgtgccaagttcataatatacttttcggcattatttatacaatgaactaaaacgggtgaaataacagttgaaaagagtatttaaatagagttactctagttcgttaatataataaattttcttaaatcgctaaaaaacatatattataagtagggatagattgctgtttttccatcagcgtatcgttgaaaagaaaagcgatgggaaatattaaggaaatataatttttaattaactaaatctcaaatcatggtatacgattttgaaaacttaaacatttgttaattattgcttaatcagatatattcataaataaattatactggtgaaagtataaattgtatagcttaacaatagatacaatgttacgaatgcctcaattctttgataagaaaagttgagaacatcaacatgttgctgtatattaataccacaacaattaagttttttaatttggaatacgatacccctcattatcaggattaccttcatacattgaagaggcttgtgaattgtttagtttgtaatatagttgtttggtcaaatcctgaaatgatgagtgttacaaatctaccaaaccattattataaaatttgaaaggacaacaccagttttaaaagtaaataactcctcgacaattggaagaattatatgagggggtaatttcttcccgaaaagaagacgttaattaattaaaatatacaacttccttcgtagaaatctattacttgactggcaacagccctccactatactaacttcgtaacccttttaacctctaattcctaaattaataaggcctagattaggcgcatatatatatatacagtctttttaatcaaatgagactaactagtaatatgtaaaaatcgaatgtatcttagttaagtccgttgtaacttcattttcaactacccgtaaaaattttgaatccccagtatttttattaagcgcgggggaagtttactgggaactaaagaatcatcgccggtggctataaataaagttacagcggactaaaccaacatacatttggttactgaatattactagttagtctcattcatctaaagagactgtatatatatatatgaaacaaaattcaatcaccatagttgtcatggttgttctatacattacttaattaaaaacggcaatgttgataggctaataataaaattggcatctttcctgatagagggatagaattggtatgtatcgatgaggtaaaacaaaacaattttaaattatacgctattatgaaaacaataataaaacgtaaattttggatcaataaaaaaactgagattccaaatcaggaatgttactttttaccaatttcactaagccagctctcaattccctagtaattgatacatgtgatgttacttaaatttttcttggtcagcaagacttcaccaataacgaattaaattattattagtgaaaagtttaacaatagtaaaatacggcaaataataatacgagaagcgagatcggtgaatgactataaagaacgagggaatgatttttcgaaataaaattccttgcatgaagataatgtgatagcaacaaaaggtgtgcttttttaaaattttaatcacgcaagaacgcgcgtattacacactttttcaattgtacgagtaatttcaaattctattattttttttcatcatgaattcgtaatttcaatttgtcgccatcagcggatttaaattgttttttttgatgcagtcctcaatgtaactatcgtttatgacctttctataatttttttctctctgtcccgtttctttatttgtataaaagtaatctctaagaagcttttttattattagctatgaaatttagttattccaattgaattatccaaattatttaaattatttctatttacctgtcttttttcaggttatttttcatttcttgtttattttatttccttttgtttattatccattgctatctttattacacaacacatatacccatttaattagttcaaataacttagattacaagttaaacatatatcaatacaattaaatgactaaattaatagatagattaatattaatatttttattcatattacaggtttgtagtggttatgaaattactgaaacctcaaatgttttacaaaaacgtgaacaatattcaacaatttatggttctcaaccaagtgctacagttttaaaaactgttgcaactgcagcatctgcttgttcacttagtttccacgatgtaggttatcctgcagcaactgtttattatgatccaattgttaaacaagtcggtgataatctttatgaaggtacaatgacatttagtggtgaatcatgttcagaatttgattacgctaaagaaattaaacttgacggtgtcaagggtaacgttgttttatggtcttacaataacatccaaaacaaagataatggtattaattacgttaatggttgtaattgggttacttcatttctcttctatggtgactatgatgctaaaaataatagatattgtatgaggggaggatcacaaattcaatatgattggtattctaataaaaattccatggattattcatttggatgtggttcacaaggacagttccaattatcacaactatgttggccagctgaatttaaagcagattcatcatcatcttcctcaacatcaacaacatcattaacatcatctacattattaacatcatctacatcaatcaacaacaactacatcatccatcatcatcaacaatcaccatcatcatcaacaacaactacatcatcatcatcatcatcttcattatcagctgctaatattacaccaatcagcggaggccaaactacaactgcttcaagaaaggcaccagatgcttgtactttccaacaaggaccttgtgattcagactacgattgttgtcaaggattaatgtgtgataaactttctaatccttactggtatcattgtgtcgttgatcctaatcaaaaacaatgtacgcaaataaatgctggatgtcaccaagattctgactgttgtgacggcttatactgtgacaatccaaccaatccatattactcaacatgtatgttaggtagtagaaccgcatcaattccatctgcatcatcaacaacaacaacaactacatcaacatcatcaacatcaacatcatcatcatcatcatcatcatcatcatcatcatcatcatcatcatcatcatcatcatcatcatcatcatcattatcagctgctaatattacaccaatcagcggaggccaaactacaactgcttcaagaaaggcaccagatgcttgtactttccaacaaggaccttgtgattcagactacgattgttgtcaaggattaatgtgtgataaactttctaatccttactggtatcattgtgtcgttgatcctaatcaaaaacaatgtacgcaaataaatgctggatgtcaccaagattctgactgttgtgacggcttatactgtgacaatccaaccaatccatattactcaacatgtatgttaggtagtagaaccgcatcaattccatctgcatcatcaacaacaacaacaactacatcaacatcatcaacatcaacatcatcatcatcatcatcatcatcatcatcatcatcatcatcatcatcatcatcatcatcatcatcatcatcatcatcatcatcatcatcatcatcatcatcatcatcatcatcatcatcatcatcatcatcatcatcatcatcatcatcatcatcatcatcatcatcatcatcatcatcatcatcatcatcatcatcatcatcatcatcatcatcatcatcatcatcatcatcatcatcatcatcatcatcatcatcatcatcatcatcatcatcatcatcatcatcatcatcatcatcctcatcatcatcatcatcatcatcatcatcatcatcatcatcatcatcatcatcatcatcatcatcatcatcatcatcatcaacatcaacatcaacatcaacatcaacatcaacatcaacatcaacatcaacatcaacatcaacatcaacatcatcatcaacatcaacatcatcatcatcatcatcatcatcatcatcatcattattaccagctgctaatattacaccaatcagcggaggccaaactacaactgcttcaagaaaggcaccagatgcttgtactttccaacaaggaccttgtgattcagactacgattgttgtcaaggattaatgtgtgataaactttctaatccttactggtatcattgtgtcgttgatcctaatcaaaaacaatgtacgcaaataaatgctggatgtcaccaagattctgactgttgtgatggcttatactgtgataatccaaccaatccatattactcaacatgtatgttaggtagtagaaccgcatcaattccatctgcatcatcaacaacaactacatcatcatcatcatcatcatcatcatcatcatcatcatcatcatcatcatcatcttcattaccagctgctaatattacaccaatcagcggaggccaaactacaagatcatcggttgatgctaaccactacattgaggttctatcatcaccagctccaagctcatcggttattgcatcatcatcagctgctagatcatccgatgttcaatcatcagcaccatcatcagctccaagttcatcagtcattgcattttcatcagctgctagatcatccgctgttcagtcatcagcaccatcatcagctccaagttcatcagttattgcattatcatcagctgctagatcatccgctgctcagtcatcatcacaagtattaagatcatcacttgatgctgaacaccacaccgaggttttatcatcatcagcaccatcatcagcaccatcattagctccaagttcatccgctgttcaatcattagcaccatcatcagcaccatcatcagcaccatcatcagcaccatcattaattccaagttcatccgctgttcaatcatcagcaccatcatcagctccaagttcatcagtcattgcattttcatcagctgctagatcatccgctgttcagtcatcagcaccatcatcagctccaagttcatcagttattgcattttcatcagctgctagatcatccgctgttcagtcatcagcaccatcatcagctccaagttcatcagttattgcattatcatcagctgctagatcatccgctgctcagtcatcatcacaagtattaagatcatcacttgatgctgaacaccacaccgaggttttatcatcatcagcaccatcatcagcaccatcattagctccaagttcatccgctgttcaatcatcagcaccatcatcagctccaagttcgtcagtcattgcactttcatcagctgctagatcatccgctgttcagtcatcatcacaagtattaagatcatcacttgatgctgaacagcacaccgaggttttatcatcatcagcaccatcatcatcagctgttcaatcatcaactccaagctcatcagttattgcatcttcatcactagctccatcatctgttgatgtcaaccatgtttcatccgcaccatctttgttcataaattcctcagttacttcttccatgttggtcagtacacataatgtttccaagctcattactgagaatgatgattcgacaacatcgacaacatcgacaagggcacgaccacaaattgtccctatcactgctttctcaggaggtgaaaaatcgcacacatggaccacatcagaattatcatcatctccatctttatactcccaatcatctaatactacatccaattcatcatcaataccactttcagcaaaaaatactaccgtaccaccaccaatagtttcatctatggatcctaatcattttacttcctctttaagttcatcaattaatccagatcatcatacatcgtcattattttccgcatctttatcaacatcctcattatcagtacaatcttccttagtatcttctatgattagtactgaattatcatcatcatcatcatcatcatcatcatcatcatcatcatcatcatcaggtccaagttctttaattattgactcatcatcgattgacactaaccatcacactgaggtttcatcatcatcagatgttcaattaccagcttcaagctcatcagttgttgcatctttatcagctccaagctcctcaaatattgaattttcatcatcagccgcatcatttattgatctcaaccatttttcatccaacccatctttgtccataggctcttcagttacttcttctatgttggtcagtacacatgttgtttccaagctcactactgataatggtgctacgacaacatcatcagcaaaaacaactaatgttccacaaccaaccgcttcatctgtggatcctaatcattttacttcttctatgtctccatcaacttcactgtcctacttatcattaacatcatcattagtttcaaccgattttaagcatattacagatttgtcatcatcatcatcatcatcatcatcatcatctttaagtttatcaatgaattcaaatgctcacacatcgacattattgtccgtatctttatcagcatcctcatcaccagtacaatcttccttagtcgcctcaactacagagcctatgagtagtactgaatcatcatcatcatcatttatatcaatttattctttcattgatccaagagcaccaatcaccagttatccaccttcattatcaaaatcagttgctgaatcgtcaatgtttaacaattctttacatttaaccaaacttccaacaattcaaggtgttgaaacagaagatttcgataaaataaactcaagaacaattgttacagttgttacagatgtggaaaccttaactacaacagtttgcgatgaaaaaacatttgttgactattcaatcactactgaagtttcaaatgatgttacacaactcaaatctgttcctactacaatgacggaaacaattcctttgacaacctcaatatatacaagcctagtcactagaactattaccacatgtttagaagatttggtacaatctgattcgagtttgaattctgatctatatttcacaacaccaacaaactcaattttgtattcttcagctgatgaaactattactacaacaattgttgaaactaacttagctgcatccacattatttacagaagaaacacaccttcttcataccacttcaactgtaacttcaaatggtgttacagatgttattattgctacatcaaccattactgaaagaattgcaactggaactacaattataagccagttagtcaccaagaccatcacatattgccctggaacaactgtttctactgtaataccaggtgataatccagtatcaagtggtttaaccgaatcatcaccaacaacatctgatttcatatctacagccaaatctacattcatacctacatttaccccaatatctaccccaagtggtgtttcaaatgaaggaaatccagaatttgaattttctaatggctctgacaaacttttattcaaccacagttacatgattttaattatttcagtcatttcatcagttttcctattctagatattccaatttttgaaattcgttttttattgtttttatcagtttatttttgttactattattatatcattattaactttgcttttctcgttgttatttcaatcatcttttttttacctgattgatataatatatatatatatatatatataaaccaaacttttttatagacttatatagaaaaaaatttacatttttttagttttagctgctaagccaattaaaattttaatcgttccactgatagggaaacactttccgcgcctgtatgatctttgcacctcagaaagcttaatttcagcctgggatcatcactttgctagtggttaaagtacattatgtttcttttctccatcttcaaacattgtaatgggtgacagaaacgcaaatccccaagttccaaaaggttggaaagctgtttgggatgataaatataacggtaagtgcattgattcataatctatctaattttggataaacgaacttaatactaacgagataaacatagaatggttttatgttgatgagtctactggtaagtctcaatgggaacctcctaggggtactgtattcccacaaaatagttctccgcctgcatactcaagaccgtcagagcctttgaggcgtcaagctcaaccacaaccacaaccacaaccacaaccacaacaacgatcataccaacaaccaggataccaacaaccagcatatcaacaaccaatgtatcaacaaccaatgtaccaacaaccaatgtatcaacaaccacaatacattcagcaacagcctcaacgctcatcacgaggtgggttaggtactatgggtggtatggcagttggtgcagttggtggtttactactgggtgaagcattagatggtggtcatcatgaagaggttaataattactatgttgatgataatggaggttatgatgataatggttttggtggaggagacttcggtggtggtgatgatttcggtggaggagattggtaagtttcaactacatataattatcctttgtagtttcctctttaacttttaaataaacttattatataatatacataatatattacctgctttcaacagatctaactaaatccgagaacaactgttataatcaatttattcgcacgtctattaatttaatttaacatgaatttgatgtgggcttttattttacgtaattcatatactgtacagttatatatattcttggacgtgttcatgaagtttacaatataatatagccatatatttataaaacttattcaacaacaatattgaacaattgaatgtccgaaaaaaaagaaagaggacagaaaacgacaaggcatttagttgctggattttcaggtggattgacatcagcattggcccttcaaccattagatttaataaagactagagttcagcagagtaaagataactctcttatgagtgtacttaaaagtataacttcagtgaaacaattatggagaggtacactaccaagtgcaattagaacatcagttggtagtggattatatttatcaacattacatttagccaggaataatatttccaaattgaaaaattcccaagcacctatatttaatgcttcatctaaactacccaaattgaaagcatatgagaatataataattgggatgttatcaaggtcaattgttggatttattactatgccaatcacagttattaaaattagatttgaatcaaatttgtatcaatataaaagtatcaaagaggcagttattgacattttcaaatataatggaataaatggattctttagaggttttggtgcaacatgtctcagagatgcaccatatgcaggattatatatttcatcatatgaacaattgaaatctattttacctaaattgatgaatttacaaaaaaattttgatcataataataataataataatacccaagaactaggtcatttatcttcaggaattattaattcaactagtgcaatgattgcatctatatttgcaacaaccgttacagcaccttttgatacaattaaaacaagaatgcaattatcaccagaggaatttacaacttttagtcaaaccagtattaaattatacaatgaaaattttatgagattttttgatggtttatcactgagattaattagaaaggcgggtagtgcagcaattgcatggtgtatatatgaagaacttgtaaaaatttagtataataataaataatgaatgatagtaataaaaaattttatagagttaaccagtgttcataacttagttggggtaaaacaaattgacaatttaattgacttacttgttcatgatttaaaatacttaatgcacataatcctaaaaatgaatgcattggatcaggaaattcatcaggatctgtcgttttattgaagccacccattttaaaattttgtgttttatttaaaaggaaatctagtgctttctttgtattcactatattatctaatgaaagtaattttaatgaagctaatgaccaaaatacataacatgtatcaccatatttattgagtctaccattaaatcctccaatatcttccatatcagcatattcattccaatcatattctggtttattgaaagtattaaaatctatttgacgatgtgttaaaaagtctaataatgatttatgattaaatttattaatgtgattaatattaaacaatgaatcaacagcacaaaataccattccacaatgagattcatcccctgggtacattgaaaatcccccatcataagactgtaattgaaggataaatgaatataattttggaatatctattatgtcaccaactttactactatctttaactaatattcgagatattgtagttgcaatcataacataacgtaaatctttaacatatttactaagaagaccattagtgaatccaccatttgataattgacaagctttaacaaaattgagaattttcctacgatcaattcttttaaaattgtcttttaatatgagcaaacattgtaatgaaaaacaagttgcagctaattccatcgattcttcagttttattataaatcaatgaaccacaaaatcctgaatatttatctgttgttataagatgtgagtatatgaaatcaatgaatttttgacgttcttccaccgtaaatgaggtttctaatgtattcaataattgtaatgaagctagagagaaataagcaattgcaagtttattactatcttctgattgatatttactcggaagaagtgataaaaatcgtttatgacacattgtgtgcatttttacattaatcaatccatccatttttttttgtagttagttagtggaatatgcttgttattattagaaaataatataaaatacagagacaaatagtttacatacaatgtaaaataaaaatgaagataaattaacaagaatcaatgtaatgaagatcaatagaaagtaagaaacctgaattttcaagaagagcaataatcgatttaatgatttttttcagtgcgtatttgaggggctcaactggtgaaaaaattgtatgcaatttgtcttcatttacaatcaatgatggttttaacactgtctgtaattcattaattaatactgcacaactttgagaaatggtgagatcattggacttatatattgaacataatgcagaaaccagctctgtgcattcgttataagtgtacattcctttcataatagatgttattgacaatatgacaacattagaaaatctactatatagtaaacatgattcaggtaatgtaaagttggataataagtctttaattaatattatattttgaattgttgcatttgaaatgactgtaaaattaggggtatcaggatcagggaataaatttgaaggtttaaatagtaaagataatgtataataatattcaattgacatccataccgcaaataattgcaatgttgaacttttcaaatgagtatttgtcaaatttgatagagtaattctacactcattataccacatatcagcatcttgtcttaataatgataatttaataaatttactgtcattatcatcaaaagtatcactttgtttagattgatatagttgtgaaataatttttgattgaattttacataatttaatgatagttatttggaaacaaattttttgttcctcatttttggttattgaaattggtaaggggacattaatattcattaattcaaaatttggttgctggaaagttgttgaagagaataatgaatctgttataaaaatagtccaaaataatctatttaaatattcaacgtcagataaagttattccttcaatatttgaaagttttaaatttgaaagtttatccaaatgccatttttgggtatattttgataaaattgattgtataaaccaagaagtgtcaattgaagaatctgaaagaagtgaaattaaacttaacaataccaaaagtctcaatatttgaacgtttgataaaggatgagactttcttttaagtaatttgaatgccatagtaaatgtaaatttaagataatttgcagaaaattttgaatctgaatccgaatccaaatttgatttagaatttgagttgtacttggaattagagaatatgattgaacatgtgtataaaagcaaaaattcaattgaattatagtaatcatcaattagttgattttcaccattccaattgaatttaccacttttaaaaattgatagtttttgcatcatcaaggaggaatcaaagaaaataataaattctaataatgttagaaaattttcatggtaatttgatgataagtgattactattattaataaaggtaggataaatattttcatcaatatagcctatttgattaaatatcaaataaagtacttgatattggaaagaatttgatgatgcattactaagtaaatcaataacattaatattatttgtttgtgatacaggtgttgagaattgcaaagaatttcgatctgaactatggatattagttggtgagcatgaacgtaaagaatgactaattgatgagcaagagttttttcttcctttatgtttatttattctaaaatcagaaaatgatgaagttgttgtagttgcaggtattggtattggtggtaaggcaaaataatttgcattaggtgaaattgataaattattattaaaattattattaaaattattagtatcattattaatatttgaagataatgaataagattttaaagatgatgatggtaatgagtctaaagctgatgtcggggaagatacagaacctatattaattggaggtaattgaactgaaattgatttccttctcagaggtatagttggtgataaaggttgtgggggtgaaatattattaaccagaatttgtggaatcataatatttgaaaatttattttgattattttcaatttcttcatcagtaactgatgatagagatgaatttggagaactgcttaatgattgagatgtaattgttgacgattgtaccttaaccgtctttagatttcttctcttgtttttacgctcaacatattcacaagtttcattttgtttagtacaattttgacaaacaggaagggttttagaacatttctttttgagtcgacgacaacgaatgcaagcatattgatgaaattgttgctggtttttatcattatcagttgctgattttaatgttgcagtagctattaatataggctcaagcgacattgtacggttaggaaagaagtaaagaactataatgtttaatggatcaaatgatgattcaagaataaataataatgtaacagtaatttgaataaattaaatataataatcatgcatgacagtagtaaataataggctgaaattttcgccaataccgttgataataataataatgttaatcccactccattatagactgtaaaactgtaagaatctaagggtccttttctctaaagtgcgaaagcagttgcagcattttttaccgtcatgtgtcattcattaatcattaaccaatttcaaactcactccgaaacccgaagcggatatccgagcccctctttttaatttaaagagtcaacttccgttattaccgtttttccgattatcttgaaaaaagaggcgtagaagaaaatacgaggcctaggttcgactcatcgaccccttctttttcttcttcttttttcttttttcttttgatagaatatatttttcttttttccggcactaatgcacaacttaattccattaatattaaaattaatctaggctaaatcttaattatcagttgttcactagtgtcaaacaatctctacattttccaaaagttttttatcaatatttttagatctatctatcactttgatattttttaagggcactaactataataataagataatataattatatgatcaaatgcagaatactctattaacttatccctatccccatcaacaacaacaacaatcacaacaccatcaccatcatcatcatagccctcatcatcaacaacatccaatatctcacaatcatcgttatcagaggaataattataaacttaataaatcttcaagtttatcttcttatacaagtagatatccattatatgcaactgattggtctttccaaaataatacttctcgcatattgttatcatcttatcaagaagattcaactaataaattacaagttgtatatggtacattaaataataatttatcgttatcggaatcaacggatccaattgattcaataaattcaatttattcttcatcaatatcatcaacttcttcatcaaatacaaattcatcttcaaataattctcatttatatccattttggaattttaataataaatcatcagattgttcagttaaatatcctgtatctcgtgttcaatgggatccttcaatgaataatgaacgttttgcaacaacttcagaatgtttacgtatttatgaagttgatcattcatctccattaggtacaaatataattgaacgtgcaaaacttttcaattcaaaaaatttaaatactaatcaattaccaccaatgacatcatttgattggaataaaacaaatccaactaatcttataacttgttcaattgatacaacttgtactgtatggaatttaacaaaggaaacttattctgctaaaactcaattaattgctcatgataatgtagtttatgatgttaaatatattttcggagattcaaatattttttcaagttgttcagctgatggatcagttagactgtttgatttaagaaatttagaacaatcaacaattatttatgaatctacaaataattcaaaacttgtaagattatctacatgtaattataatgctaatcaaatagcagttttacaacaagattcaaatgaaattattatacttgatttaagaaatataagtttaccaatttataaattatcaaatcattcatcaactgttaattcaattgcatggcatccttcaaaaaatatattattaacaggttcagatgattgtcaagcatttatttatgattttgaattacattcacaaaataatgattttaatgtatctaataaagatttattaccagtatctaaatattcaactgattctgaaattaattacgtttgttggtctcctaatggtgaatgggcaggtctcaccagtggtactcaatttcaatcttgtattgtctaactgttaattatatagttgtgagagtcaacttgaaagtcatcaaggagaagtcttatttaattgaagtcagagtcaacaaatattgaaggagtcaatataaaacataagagtcaaatgtttttttaaagagtcagtgtgaaaatgacttctcccacgttgactcctcccatttaagataaagagcttcaaaaaaaaaattatttagtattaactgttacttatacaaggtatccccttataaaaacctgattatctcttcaaaaactgtattcctactgtatatttcatttgtaaccttttttaaatacccattttacaattattatttccattgtgattatttagcaattgaattaacatctctccttaaagcatatatcatcaaaatgttaagaagtagattatcgcgtgtcaatcacacaactaaattcttatctcaatttgtaagattacaatcaactaattcatcaaaagttgatgtatcttcagaaaaatactcttcattatatagtataactaatcaatttgctgatttagatactttctcaaaaagacatttaggtccaaaaccaaaagatgttcaatcaatgcttaaagatgtcaattcaacaaatatgtcagattttatttccaaagttatccctgaaaaggttttcattggcagaaaacttgcagttcaaccattaaatggttactctgaaactgaaatggttgatagattaaaggaattagcttccaaaaataaagtttatcgttcttatattggtaaaggctattatggtacaaaattaccattagttattcaaagaaatttacttgaaaatcctgcttggtatacctcttatactccttatcaagctgaagtttctcaaggtagattagagagtttgttaaatttccaaactgtggtatctgatttaacaggtttaccagtttctaatgcatctttattagatgaaggtacagctgctgctgaagcaatgattatgtcatataactatacaagaggtaaaaaaaatatttattatgttgattcaaatatccatgaacaaacttattcagttttaatgtcaagatcaaatactttagatattgaaattaaagtaattgatttattctcaaatgaaggtttccaaaatttaaaggaaaatattgataatacttgtggtgttttagtttcatatcctcaaagtaatggttctttaccatcaattaaaaaattacaagatatttcaaatttaattcattcaaataaaggtttattttctgttacttcagatttattagctttgacattattacatccaccttcaagttttggtgctgatattgttttaggttcatcacaaagatttggtgttccaatgggttttggtggtccacatgctgctttcttctcagttacaaaggcattacaaagaaaaatgccaggtagattaattggtattactaaggatagattgaataaaccagcattaagattagcattacaaactagagaacaacatatcaagagagaaaaggcaacttcaaatatttgtacagctcaagctttattagctaatattgcatcaaattatgcagtttatcatggtttagatggtttaagaaatatttcaaacaaaatttatggtttcacttctctgttagcaaaggaaattaaggaaaatactagtcataccattgttaatgattcatggtttgatactttatccattaaattaaatggtacgactgcagatgcattattgaaaaaggcagttgatgattatggtattaatctttttaaagttaatgaatcaactgtccaattatcattggatgaaactgttgctcaaaaggacttggtagatttaattgaattatttactggtaaaaaaattgatttaactgatgttaaattacctgaattaccaaatgaattaatgagaaaagatgttattttatcaaatccagttttcaataaatatcattcagaaactgcaatgttaagatatttatattcattacaacaaaaggatatttctcttgcatcttcaatgatttctttaggttcttgtacaatgaaattaaatgcaactgttgaaatggtatcgttaacatggcctgaatttggtaacttacatccatttattccaagagatcaagcaagaggttatatggaattaattgaagaattagaaactgatttagcagatattaccggtttccataaaactactttaatgccaaattctggtgctcaaggtgaatatactggtttatcagttattaaacaatatttacatgttattaagggtgaaactcaaagaaatatcgttctgattcctgtatctgcacatggtacaaatcctgcaagtgcaacaatggctggttttaaagttgttcctgttaaatgtttaagtaatggtaatttagatttaactgatttacaaaagcaagctgataaatattctgataaattagctgcaatgatggttacatatccttcaacttatggtttattcgaaccaacaattattgatgcatgtaagattattcatgaacatggtggtcaagtttatcttgatggtgcaaatatgaatgcacaagttggtttaacatcacctggtgatttgggtgctgatgtttgtcatttgaacttacataaaacttttgcaattcctcatggtggtggtggtccaggtgtcggtccaatttgtgttgcagaacatttatctgatttattaccaaaacatccattaggtgcaacttcaaatagaagtattgataatgcaatcgaaccagttgcatctgctccatttggttcagcatcaattttaacaatcccttatgcatatatcaaatcaatgggtggtaacaatattccattttcatcagcaactgcaattcttaatgcaaattatatgatgtatagattaaaggatgcatataagattatgttcttaggtgaaaatgcatcaaacactcaaagtgatgataaaattaattactgtgcacatgaattcattattgatattagaccatttaagtcaattcatattgaagcaattgatgttgcaaagagattacaagattatggattccatgcaccaactatgtcattcccaattccaggtacattaatggttgaaccaactgaatctgaaaataaggaagaattagatagattcatcaatgcaatgttatcaattagagaagaaattcgtcaagttgaaaatggtacaagtgatggagcaattttaaagaatgcaccacatccattgactgatttattagaaacttcagaagaagaatggtcaaagagaggttatagtagagaacaagctggtttcccattaccttatttgaaaaatttcaaaacttggccaactgttgcaagagttgatgatacttatggtgatttaaacatccaatgtacttgtccaactgttgaagaagttgcaagatatgcaaattgaaaattaatttttaatgcaagtcatttttaattaattctagttttttattagactgtatttttatagatttatttaacaatataattattcgtatttcctgtttttttaattgattcctttgtatttttgttgttgcagaattcaattggtgcattaaccttataataagtggctcgtcaactttaattagccaataacacgcggcctatttgaaataaatttcaaatcgtgcattcattatagttcacatgattgaataaatatgacttaaagttataaatataaaaagacagtacaaaaataaataaaatattatataagaatttgctatattcattttataaattataatttgtttttaaaatagaatgaataaaagggaaagtttataatttaattatgcaacataaattgttgattgtaattgataatagtaaaaggatatttggtttgtttgttattagaatggaatatttttctttttcattaatatatatatatatatatgatgattaaattgattatctatcaacttcaccgaagaccaaatccatggtaccaataattgcaaccgcatcaggtaataaatgacctcttgaaatatgatcaaaagcacctaaatgagcaaaacctggggttctaatcttacatctgtaaggtctttcagaaccatcagaaacgacataaacacccatttcaccctttggagcttcaattgcagtataagtttcaccttgaggaacttgataacctttagtgaaaagaaggaagtgatgaattaaagtttccatatcgtttttcattaattcttttgaaggtggagaaatcttgaaatcttcaactttaacaggaccagctggcatatcattaatacattgttctataattcttaatgattgtctaaattctgccattctgactaaatatctatcataacaatcaccatttgtaccaactgcaatatcaaaatcaactaaatcataagcatcataaggttgagcttttctaatatcataaggaataccagaacctcttaacataacaccggataaaccataagctaaagcatcatcagctgtaacaataccaacatctatagttctttgtttccaaattctattatctgttaataattcttcagtttcatctaatctatcaccgaattgagttgcccacatataaatatcatctaataaaccaaatggaatatcttgtgagacaccaccaggtctaaaataagctgaatgtaatcttgcacctgaaactctttcataaaattccattaatttttctctttcttcgaaaccccataagaaaggagttaaagcaccaacatccatggcatgtgataaaacagacattaaatgatttaaaattcttgttatttcactgaataaagttctaatatatttagctctaattggtacatcaatatttaataatttttcaactgcaactgcaaagacttgttcatttgtcatcatagagacataatctaatctatcaaaataaggtaaagcttgaatataagtttttgattcaattaatttttcagtacctctatgtaataaaccaacatgaggatctgatctaacaatttcttcaccatgtaattctaaaatcaatcttaagacaccatgagcagctggatgttgaggaccaaaattaagtgtaaaatgtctaatttttgattttttaacagtatgatcaggagaatcttcatttgataaattccaagtttcccaatttgatgaatcattaataaattcagaataattacccattgcagaattaatttctaaattaacagttgatgtaaaaccatcatcatgatttgaatttaaatcttcaggactttcttcacctttattacctcttttctttataacataaaaatcattatcatttgcagattgttcaattttatgaatttgaggcatttgctttaaaacatttgaagttgaagatatattttttgataataattttgagacattataactataatttaaattacgattaagttttaaatttgctcttaaaacggaagaaagcattatgtataagtaatgttaatcttaattaattctgtaattggaagaggtagggatccctttgagtaattaagtttatactaacttgaattataaattatgaatcaaaactaaaattaagatagtattatgtttaaaaaattaatgttgtaattttgtcgattgtggttggttgagtgtatttttcctctcttagtttttcctaaattctttttttaccctcccctcactttttgacaaaaattgtcggaaatttagtacttgaattatacataaaaattccgaaatataacaattacgtaaccaacaattattgattacataatcagcgttttaattggtgtacaggggtaaattaaaggttatattacgtaatgtataatttttctagaaggtcctactacttagtaaaggctttaatttgattctttaatatttcacacgggtcttagtcattactgttgtctagtactccgttaatcggtattgtattggcatgatattactttttatttcctatttccattttattcataatattcgttttaatgacatcttcatattttttatgggtgatcatgtatttattcaaagccatgtaatatttttatcttcaaggcaatatccccgtgtattaatgattataatctggcggattttaacgctttctttttttatttcctatttcgtgggtttttttcgatttttcaatttttttgatatttaatatttaaattattcgccttccgggttaaattttaatcattttcaacttttccagttgtctctttactctgttcttcattctgttttaacaaacaacaaacacatattaattaaaaaaatgccaagaaactcttcaagaagaccagctccagcttcaaatgcaggctcaaagagatctgtattcggtggtaacactcaatcaagatctgcttcaactatggcagcaccagctgcttcataccgtggtccagcaactacctctgctgctccagctccagttggttcaccagctgctgctgcacctcaacaaccaggtttatttgctcaaatggcaacaactgctgctggtgtagctgttggttctgctgttggtcatactttaggtgcaggtttaacctcaattttctcaggttcttcttcagatgcacctgctcaacaacaacaagttccaattcaacaatctcaaggtttagctaatgaaaataacaatgcctgtgctgctgatgcaagaaatttcactagatgtttagaagattcaaatggtaattatcaagcttgtgatttctatttacaacaattaaaggcttgtcaagctgctgcaagtcaatattaagttatttaatatagaaaaaaaaacaatttaaattattaatccaatatattccatatcactttttattgttattaatcttattattcaaagattgaatctataccattacccgttattcatacagtatagattttagataaatagaaaaaaaaacttagctttgtacttacgccctcttatttgtatacattcattactttattgcattattatacatcccttgtttatatttttaatcatctgcaagtaagctctttctatcggatttattatttataactattgaattatatagtaaaagtacataacaattatatatcgtcttggattaaggaatctaagataactgatggtgctctcttccttttaccattcttatctaatttatgttcattaagcggtacgttattaacagaaactaaactttggtcaatcattttctctagttcgttcaaatcaactgatgtacatcttgaatgtggtctcatagttttattattatcaacaattggtgtgttatgttcagtttcaatagttacactaggtgagcttaaattcatatttaaattacttgacaaaactttattattatttggttcttgtaaatcaacacttgaattaatcaattcattaattggtgatataaatgacattctatttgtatttctatttggattgtattcttgtgttaatgcattacgaagatttctaccaggttgtgaaacttgatttgcatttaacaataaattatttgacgatgaggtagatggtgtacttgaatgtgtatatgctgaaacgttatttgaatttggtgtattattaaatgttgagtatggtgaatttaatccactcgtatttcttttttcttcaaaaaatttagtatcataactcatgaagcttgaattattatcattaaaacctaacttaatatcacctaatggaccattataataatcttcatcaaacttagtgacatattttgcatctttacgatttttcatccagaaaaacaaccttgcaattataacaattatgaaaaccgatattattatactaccaactgaaataaagactgtacccctgacattttcgcagtgaagaataaatggatcttggtaaactggaactccagctgtgtatgtaccgttatatgatgatgttgatgataatgttgatgatgctctcattgaattcgttatagagctagaagttgtaatcgcactttctttcaacgttgtatgtgttgatctgatagtttgggctagagttgttttacttgacattgtggaatttggatggtgtaaaggaatgctagttaatgaaaaattattttaatgaatgaaatgattatacctttaaagaatggaaaggatttacttgttcaatgctggagaaagaagtttcgttttcaggtgatgaattttctttcaatatattagaaatacttccttcttaacgaactaaaggaaaattgctaaaagattctttctaatcgttaaagtattaatttacttaaagtagttatattacaatagatacacgtatttttagttaagaaataatttccgaaaggtaaatacacaaaacgcggttttcgtgttttctacaaatacaaacacataatcgcgtagggggtgcctttcttttttacctttatccttactcaattctaattctctagaacttccaatctgcatctgcagattcaattgcccatgcaaatttctctcttaacgttttagtgaacaatttttcaattggaacattgaatttctttgcaaacatcactgtaagacgtggatcaatataattcattttggaagtacctaatgaaacagtagagttttcttccttatcctttaattgtaaactggtattcttaattctttcttcaagtttatcaatttgagctttcagcttttcagctgtataagtggatttttcttcatatttttgcttcttagcttcacttttatattgcttgatcaattctttagcactttctaattttttcttatgatcttccttgatctccatagatttaactttataatcttcaggcgaaagttctttcttttcaaatttaagcttttccttatccttttcaaatttcttgctaattctatcaagttctttctgtgaccatctctcaacaatttccaattctttctcttttgttaaatcatctatttcttcaaaatattctaattctttctttttcatagttttatcaagttgtaacattattctctttaatttaatcttttgccaaatcatttcttcaattttttcattaattttttgaacacccgcttgatgagcttttggaattgtacgttgatggttacataaaattgcaacttctctattagctgcattaaatgcaacaactttttcattaactgtaccctcatttggtatcaaatcaatttgatcttgcatagttttagatgcattataagttctgaaaacttttgctgttaatccaggcataaattcttggaaatatttattcaaaattgatggatctaatctatcaaataaatcatctcctggctttttaggatcttttttgaaaatcttcaaatttttgaaaacttgtgtatcaacttgaacttcttgataaaatctaatagaatctttacctaagaaatcaaaaataacagttgaaggtggtttaagaaaaatatgctcaaatcttaatgaacaacaaccaacagtatctgcttcatcatcacgcttttcaccaccagctcttaatgcaaaaacatcaatcaaataagtcgcagttgcaatttgtctatcaatcatcagtgaactttttagctttgatctataatcatttctaattttatcaacatgttttttcaattctctagctttttcaaattttttaaaatctgacatacctttgaatgatgaattttgtgaaaatctaacatatttaacactacccataatattttctctccacattgctaaccaagtgactgtattatcatgtttaatatcctcccattgatgaccagctggtggaggtggaattggagcatctttacctaaattcagtgtaatactttcaggataaactcttctctttaaagtacctgttttaggatgagcaccacgcccacgaaataaacctggtggttcaatacgaaaattaccaacttgttccttacggccatttaagagacagaacttgtatttttcttcactagcttctttttcctcctttattttcttcttttcctttggtggtaatgctttcttttcttctcttagtttgtcaaaatgattgaaagatttttgaaaaatcacatttagaaaattcttgaatgtcagcatcaggacatccaccagattcttgtaaaacttctttgaaatctctaaagaagtttttctgaaatgtagggtttttggcatgatctgattccaataacgcaccaaaaaaccctgcaacttcttcagcttcttttggtagtgtaactggtttaccatcatagtataatttgacattttttggtaatggttcatattctggtggaaataaaacaccgttatgttctaaagtttcccatttaacttcaccatccatatcatcagtattctcccaccatttaaaagtatcatcgttttcatcatcagaattggatgaatcatcatctttgacttcatctttaacttcttccttaacttcatctttgatttctttcttaacaccgttctttgagggttttttggagtctttttccttttttattttctttgttggtgaagtttctgatttaatttttctttttttagttgaatctacaacttttttctcctttttcacaacctgtttccgtcataattatataagtactgactaattgatcttagacataaaaaccaaaagaaacaaataaaaatattttcgttaaaattaaatttcaaaaaattagtttatgtcatctaagaactgtatacaatcgatacattaaaatttattcaagttgaaaaaaaaaatcaccaaaagtaatggagacgccagaaaagacgcgaaaattgcgagaaattaagtggtgagtgaatgaaaattgcgagaaagaagcaaataaaagaatagaacagttggaggctcagctttataaaaagctaaagttaatatgggcttctttaatgcaagtataactctctttcaatggggataatgtgaaatactttggggtagtgattccaaagttgacattaccatttttgtataagtacaatatatacacatacagtttttaccagagtatattgttaattaatgtatacaaggtcaaacagtaaccctgaaagtttaaatttttacaaaaataaaagtaatcttaacagtgtaatgtgacgagtaacaaaattcgcaactatttttataaacgttttaatttttcaattagctctatagacaaatgaataccgttatctgaaagtaatacgtagtcggacatttgatgtattattcaaacgtaatgttatgagatatggtaacagtgtttacgtaaaaaattctttatcgtattgttttacgtgttttaaattaaactttatttagttagcagtcgccagagatgactatcagaaagcatttattgtataataaatttgattgattagggtgtgtgttacataattgtaaacagatcaaaatattaaataataaaaattaccgaaaagggacaaactgtcaacaaaaaatcaaaacattaaaatttccaaatgcggtctacatttttgaaatgtaaacaagaatcctgatggggaaattaatctttcttcaattttgttcaaagtggtaaaaggaaaacagctggaactatacttcatctgatatatcactttcttaggtttgaagaactaactctaaaacttgtttcaagacctttttatcttctacttcttcccactttttattatcaaaatcttctttcttgaattattgtgacattcatttcctcttttatttgaactttatttttatttcttttttatttgaaaagcatcttgaacatttctttagtcaatcgaatattaaattcttattaatattcagcaacaaaatagttatatcattcaagagtaattcatggaaagaaaatattattaattttgaagcatagcatacatattataaatacacatcagacagaatttacaacataaaaagttagaaatatcacatagaattgacaattaattatccatatatatttgcataaaaatctaaaaactaatatgagttcaaaaagacctttacaaccgctaaatgatgttcaattgaataaggcaaatattcaatctccaaccacagttaaaactcctataaaaggtgcaatctctaaaccagatgcgggtaaaaagaagaaaagagagaagttaagttctctatgtaagacaccaccaagtatagttaaaaatagacatggtagaggatacagaagaggacatttcttaggtgaaggtggttttgcacgttgtttccaaatgaaagatgatactggtcgtacatttgctgctaaaactgttgcaaaggcatcaattaaaaatgaaaagaccaaaactaaacttttaagtgaaattaagattcataaaagtatgtcccatccaaacattgttgaatttatcgattgttttgaagatgatgttaatgtctacattttacttgaaatttgtcctcatcaatctttaatggaattattaaaaactagaaagatcataactgaagcagaagctagatttttcatggttcaagtaattggagctgtcaaatatttacacagaagaaaagttgttcatagagatttaaagttaggtaatatcttctttgatcctcatatgaatttgaaaattggtgatttcggtttagcaactattattaattcagctcatcctagaagatatactatttgtggtactccaaattatattgcacctgaagttttgggtggtaaagatgttggacatgggatttgaagttgatatttgggcaattggtattatgttatatgctatgttgttcggtaaaccaccatttcaatctaaagatgttcaagttatttatgagagaattaagaataatgattataaattcccacctgattctcttgtttcattagaagcaagacaattaattagagatatgttatctactgatccatatcaaagaccatcaatggatcaagttttggaatatgactggtttaaatgtggatcatttccatcacatattacaactgaatcattgaaacaaaaaccaaagaatttggctttcattactaaagaggaatctatgattaattttgcaaattgtaaacaacaagttggtattaatgatgttccaaagcatccagttgaaattttaagaacagatcttgaaagtgaacgtcctagaactttattaccacattcattatcaccagataatactaaaaacaaatataaggaagtttctcctgttaatatcaaaccatataaatctaagatttcaaatcaactatcgaaagcaagttatgataataaaatggtttatatgctgagtgaatcattatcagcaactttagaaaatataaaattaattgaaacaggacaactacaaccagatcctaaattagtacaaaaacctcaactggtcagtaaatgggttgattattcaaataaacatgggtttgcatatcaattatcaaccaattctattggtgttttgttcactgaaggtcatacagttttgaaattccaggatagaagcgatatattcttaattcatcctaatgaggaaactggatggaaagttgatcatttccaaagagaacaaattccaaaagatttatcaaatgaaatgcaagttatagaattttttgataaatatatgacagcacatttatcagatgtctcaagtggtgaaaaacatgatcaaaatggtggtgtattcttaagaagatatacccgtgatgataatggtataatgtttgaattaagtaatggtagttatcaatttaattttaaagatcatcataaaatagttttaagtgaatatggtcactatattacacatatcacaccaaataaggaaattgaaacattaccattagactatgttctgaaaaatggtaactttttcgaaactccagatgattatttcacagtcaaatataatttcatgaaacatgttttaagagaaaaaatttcaatataaaatatttcttttatgcatgtaatttcatagatacatcaaacttaaatcaaaagtatgaataaattacataaagcaaaataatttattcattgatacctattacttttcaccaaatttatgatgttgtacatttttgatcaatactgttttttcacattttactactttaattgttgttactttcgttttttttttttgttattattaatctaagcttatcccattcctctccgttttttattttagttcagttagaaaagaataattaaatgattcattctgaactttttttatgctttgaaccaatttagttttaaaaaatttaatttataatcgttatagataatattgtgtttgacatacaaaattcaaaatcaatatagtaaattttagagttatcaaatttcattttattttagattattttactagtatacagatttaaagaaaagtgtaatataaatttttatattttgctatgacaatgagattaaattataggatcattttcagaagctgttaaaatagcttttaatttccattctctcttgaatttttcatttaaaacagtaattttttgaattaaactattacaagcatttcttaaagcagttcttggattgtaaccttcctcagtttgaagtctcatcatgaaattagcaaacaatggatgttcaattttataagcagcaaataggacttttggatcattaattaattcttctcttaacaaattacctaaagtatgatcttctctttcaaatttaattaaaatacaatttggaactttagaatctggagttatttgaagcttaggtactccatctggtaaaataaataattcaaaacgatctggtgcgttcattcttacctaataagtgattgatttagtacttaagtgtagattaattgtagataaattggggattctgtaagacagttatttcgtcatgtctcagataccaaaattcatgctaagctcttctcagatctatctgtcaattttttgattttcaaaacagcggtcgataagtcgcttgttttatatgcggtcggtgcgtcgaaaaagatcaaaaagaaaaaaattgaaataagagtaaaggcggctcaatttataagttacgtaattggaattgcaaattcgtgaaaatttagtgttattttcctgttctgaggtattactatgagtgagaattgagtgattgtctaaaaaataaagggaaatcgatggttggtttactttaaatctctttctgggtttcttcccctttttatctattttattatccactggattgtttatctttgcaattgcactcataccagtgtatttatcttttcaacagactattacatttatttaatattccattttattgaatatatattatttatccccccataataatctctttctgcgtttttttattgaacaaggctcattaattttatcgaactgtctctttacaacaacaactgttacaatagtttaactgaaccaatatagaacaatttattaattttgtttcccttgtttttcattagttatgtctgcttggaatcaaaataacacccaggaaaaatcggaagatccgatttctgctgattcaaattcaacaaatcaacagaacagtactaattttgatagatctgtctctgttgctaattctgttcctgattcatcaataatgtctgctccaattacgacctctttaactaatacattaacttcatcaactgcaccaaattttaatgataatgaaaaaatggttgcctcaacaacaattaatggctcaaatgaaagtattaatggtttggtaaagactgaaagtcaagatactgttgttaaacctttatcagcatcttcaacaccagctgtggaaactacttacaattctacaccatctattcaacagcaacaacaacaacaaccacatcatcatccgacagttttacctcctccacctccttcctcaataaataatggtcaacatcataattatcaattccctgcattgtctaatttaaacacattaccaagatacaattttcaaccttctaataataatgtgaagcatacacctttaccttcttttgacagtatctccaaaagtacaaatcaagaaaatattaaattaccccctgccgatcgattattaaattccccacccaagacaattgctgaaacatcaactaataatgttgcttcaccacaaatgtcccaaaatggaacatcagaaagtgttgcagataataataatagtgccccagtttcagaaaaaccttcgggttccgaatcaacagagttcaattcatcttataaaccactcaacgtgaaagatgcactctattatttagatcaagttaagcttcaatttagagatcaaacagatgtttacaacaatttccttgatattatgaaagatttcaaatcacaaaagtaagttttcttttcaacaaatttttctccatttgaattaccatactaacattttattaatttttattgttacagtattgatactcctggtgttattgaaagagtctcatctttgtttaaaggacatcctaagttgattgatggctttaatacatttttgccacaaggattctctattaaatgctctccttctgattttaatactattatagttacaactccaatgggcacatctataagaagagattctgcaactttagagtctgcaactgaaaatactagagctgattctcaagatcttaattcagcagaatccaacaaaaatcaatcatctgctgaatatccacaacaacaaagactaccaccagtttcatcatttgcacaacaacagtcttcagtacaaaacaattcacaaagtcatgtacaagtccaaaatcaggaacaacaaactgaaactaaacaaagtactccggctgaatttgatcaagctatcaactatgttaacaagattaaacaaagatatgctactcagccagatatttacaagttattccttgaaaatcttcaaatgtatcaaaaaggtttgaaaccgatcaatgaagtttacagagaaatttctattcttttcaaagaggcgcctgatttattagaagatttcaaattgttcatgcctgagaacactgttgttaaagatttaaaacaaccagaatatgcatatccacaatattataatcaaaatgttcaattacctccagttggtagtttccagtcaaatgcaacacattttgcaaatggtcaagctgatggtcaacaacaatcaatgatggttaatcaacaacaatactctttacctccacctcaacaaattgcagttgatgatcctcatatgaatcaatatgcataccagcaacaacagcaacaacagcaacagttacaacaagtacaaccacaatatcaacaacaatatcaagcagatgatcattcatttggtaaagataaaaaaaagaaaggttctgttgctagtgttagccaaattcaaacatatcaaaaacaaggtcaattacaacctcaagatgaattccctgtttctaatttgagaggtagtatctctgaaaaaccatcattaatttctggtgttttggaacccgtttatcctaaaactttggatactgatttaacaaatgaaattgcattttttgataaagttaagaaatcaattggtaataaacaaacatataatgaattcctaaaattactgaaattatactcaagtgatgttgttgataaggaaacactttaccaaaaatcacgaagtttgattggtgaattccctgaactttttgaatggtttaaaaactttattggttgggaagaatccccattaagaattgaagatattgccattaaaaagcagcaaattgatttattaatgtgtaaagctgctggtccatcatatagacaattaccaaaatcacaaaccaaaatgccatgttctggtagagatgatctttgttggtcaatattcaatgatgaatgggttggacatcctgtttgggcttctgaagaatctggttttattgcccatcgtaaaaatcagtatgaagaaatgttattcagaattgaagatgaaagacatgaatatgattattacatggaagcaaatttaagaacaattcaaactttagaaactattgctaacagaattgcaacaatgacacctgaagaaaaggctgaatttaaattacctgttggtctaggacacacttcaagtaccatttatgttaaagttattagaaaaatttatgacaaagatagaggttgggaagttattgatgcattacatgaaaatcccgttgttgccgttcctattgttttgaaaagattgaagcaaaaggatgaagagtggaaaagagttcatagagaatggaacaaggtttggagagaagccgaacaaaaattaatgatcaaatcattagatcatttaggtttatcgtttaaaaatattgacaagaaacttctaaccaataagcaacttgttagtgaaatttcaactattaaacaggaacaagtaaacaaaaagttacatccactgatgacaagacctaaatctgaattgataactaagtatgaagattttactatctttatggatattctgaaattaatcaataccaatatgaaacataatcaactgtattcacaaaatgataaagaaagaatggaatcattcatgagatcattcatgatcaaatttttcttcatggatccaacatttattgaaaatgaattaaaggatagaggtattgcttcaatcgaagaaattgagaatgctttagaaaataacgatcatgaagaaacatctaacaaagttaatttccctactttatcgcaaactaaaaaaagaccaagagattatgatttattaaaagatgttttaagaagaaataagagaaagaagaatgatttacagaatcaagcagctactcaaagtgaagctttagctgataataacacttcaaattcacatgctgaaggtgatgatgaaccaatatcagaagaattacaaaaagcacaatcaagttggatttcaaatgacattatcgattctaagactggtgaagtaagagatgaatacaacatgttcgcaaatacccaaatttatgttttttacagacatttagatactctttataagagacttctggaagttaaaaaattaagtccagaagctaataaagagatcaaatctagaaaagaaactaagtttgcacaagatttgggtctgattgatcatcatttggaagaagttggactcgcaattaagggtgatgattcatatgctgaagctcttaatttatgtgataaattgattgatggtaagattgaacaaaatacatttgaagaagctttacgtaatggttttagaaataaggcatttaagattttcactattgatagagttattcaaagtttaatgaaacattgtcatactatagtttctgactctaaatgtagtgaaattttaatgttaatggaaaaagatcataatcaaacaactactactgctaaggatcaaattttgtacagagttcaagttagaagcttcatgaatcaagatgaaaatatgttcaaaatcacttataataaagcaacaaaatctactgtaattacattcttagcacttgatgatttaaccataaaggatgaaagtgatactgctgaaagtaaatggaaatattatttaactagctattctatggcacatccaactgaaggtttagatagctctaaaatcagactaccattcctcaaagttcaattagaaaatgaagaaagcgatcaaaatgaaattgaaggtattgttgattcaaaattatcggttaaaattgatatggacacttatagaatgagatttgagcctgaatcatatgatttgttcatcagaaactcgttatatactaaaccgccaactagtgaaaagaacaaatcaattagaatcaataaattgaatgatgttataaatggcgattatggaattgcaggtgatttgaaagatggcttgttagaacgtgctaatgaaaaattatccatcctaaaggaaaaaggcccagaagaatatcttgcatttagtctaaatcctgaattggaggaaactaaggatgaccctaaggatgggaaagatgacgttatggaagacgaaactaaagaaaaggataatgaaaccattacaaaggatgataaatctgaggaatttgttgcaacgaagaatgagaaaaataaagatgaagatcagaaagagtctgaacctgttaaggttaatgaaggtaataccataactaaggaagcgattccagctgatgtaactattatggaaggtgattcaactattcaacaagacgaaactgttgagagagttgatgtataatcatagcaaattgtcaaatatctagtgtacttttttcagtccaatattatggactcttatatattgtttttactacttcttttgaagtattttgtttttaatattaatattttgtattttataaaaaattatctattttgatttacttaattcataatcttcggtctctaaatctacaccaaagtcgtccaacgtttcacccataaaatttgaccaacttttcactgtcttctcattataatcgtcgatggtatcctcgtttaccgcatgaacatcgatgaaatctgctgggtcagaatttgatccatctggaggaaatggtaagttcaattgatcctccttcagcttatctttaacaaaaacagttccatcgccactcgcatgtccaaatgggtacatccaaaggtaaatagggcctaaagaatctaccaaattttcataagatgaccctaaatcatatgggaatactaaatcttcataagtgaaattccaaggtatctttgtatttttctttaactctctataatttactttccaggtcttcaaattgggtattggatctggtttatccggatataattttgaataatttgaacgtacgtcctcccaaaacttttcagtaaagaaattatcttgaatcctttcacattcccattgttctatcattgtttgattggatataattgaagcaacacatctgataaataaaatagaaattgttaataaaacaaacgatatgagtaatatattgataataaatatggttaaaaacgatgttgaaatgaaatatgatggcaaatttctgatttgaattaacttccagattcttccacagaagtagataaaaccatatgtaattgtaactaaaatccatactagaaatctcataaaatgaggtaagttatgataaccaatgcaattgtttgtccatggacagtgatgatccattcttaagatacattttccacattttttacaatgatgtgtacgttcaggcttatagttcttgcacttcacgcaatacttcctccacattgtttgcggttgcttaaattcactatcgggtagtttgaagtcatctttaggagatcctgctggtgtaactatagctagatagtaagaaatccaaagcattatatttgaaaattggaaaaataaaaaccatcttgacttaaggttaattgggtcattgaatataacgtacgttgttgatatctgtagatacaatatgattatggagggtattgcaatacccatccatggatgtttgaatgttactggcattgcttttcttgatatccagggatcaagttgatgtattgatattgaagatctttaagattgaatataaattcttgcatggactgaaaaattgaagtgtgggttctacattagactatgcctggaactactatcatcgttaatcttcagtagaagctttatatttggcgactggagttattatttagcttattagaatactacttaacgtatatatatatatatataatactacatttaatattgattcaaatcaaatcaaatcaaatcaaatcaaatcaaatcaaatcaaagcatcagacttcgatttctttttagtacgacgtaaaacatctctacgaagtcttctgaattctctatttaattcacctctatttttccagaaccaatcatcatattctaattcttcattgactctaacttctctaaatttattgatttgtgcttgagcaatcaagaaaggagaattaaaatgagaaaagaataaaccaatatttttggtctttctgactggtaaaatagcattggtatcttcttcttcttcttcttccattttctcatcatcgagcaatgacagtttagtaggtgtagtgctgctcaataaatctctaagtttctctgttgtgtttttagaagcatctgcgtcattagtgttggaatgaaccaaaagttggaataaattcttcttcttctgcttcttcatctccacctgtttgatcattgttctctagttcttgttgtggttcgtcaattatgatttcattatcttgtggtgcttcttgtatgtcgtcagtgaccgagatatcgtttatttgttttagttcgtctgatgcttcttcttcattagtgttttgaggttttatgtttttgtaaaattcatcatcatcctcttcatcatcaaaagtgacaactttggcatgcttttgatattcttcaataattgactgtcgtgaaggatgtaaacaattggtttctggtacgttgtattcaatttccatttcatcgtcacttttttcattttcaatatgctgaagttcgtaatcaaatcctttatcatctttgctgtctttgttatcatcttcatcttcattgatttcaatcggtttggagaaatcatatttacttaacatttgattcaacaattggtttgtcttattatgttcttcattaatttcttcgtcaacttcagttttttcaattggttcatcatcaacatgaacaccattgttagtcgaaaactaaaactttacctgtgaatctttcaataacatgatcattaccatctctccattcaccagcaacaaaacgatatgtgaaatctttaatatttttattcttatcaacaccccataacttgttctttttacatttaattacctttaatctaccattaattttaactctgattgttgaattctttaaatcagtttttcttggtgtttttctcattcttcccttaacaactaatgcagcttgaaatgggttcatatttttatttgctattctttctaatctttcatctgcgaagatgttgcctttgttttctttgtaagatttttttatcttgtctccttgaatctttttcccatgcagatttgtaatcttccttagcttttgtaattgtaagttttgaacctttgaatctaacgccatcccataactttttaagtttgatatattcacttttggatatttgcattgtaatatatgcaaaatggtattctaaggacgggtttttcgtgaacttcaaatgaatcaactattttaccaactttaccaaatctggtttcaagatcagcaatatctctaaccaaatcttttgaaaggccaccaacgtgaatacgaacttttcttctcttttcttcctctaccatactaccaaatatccagttagctctctaattatcaacctagtctatgtacaatctataccttaaatattgttaagctatataacattaaattatcctccttaaagctaaggaaacaaaaaaattttattttatcctaaaagggtaatttctagtgcacggatggtatgatttttcatgaagtcactttgaggatgcctataatattgaaatgtaatatcaattcgactgtgttgactgagtttataagtatctaaagattattactgcttgtttggataagtagttcaataaacaaccgtttgatactctctacaatggcatctcagaagactgaaacaagtgtggtgattcgccgatgaggaagaaattgttttgaatatcgattactatcttgatcaattatcagattcaaagttaagagatcaattcacaagtacaacaatatctattccattgaaggttgaaggtgaagaagttgctattgatactttgaacgatttacctgatgatccaaatgaattatgctctcttctaagtactgaagaatgtatatccaaatactggattttagtttcaaaagcttacgctaatcaaggtaaaattgatgatgcattaacagttatatcacaagcattacaaaatccatttattatttcatctggtaaaaaggaatattctgaacttaataattttgctgcttggttaaatatacttaaagcagatttattcaacgattcaacttcatttgaacttgctaaatctgaacttaacgcagcttcatctactttaactggttccgaggataatgaatataatagttttagcagaagctgtcttatctttatctacgaagaaaaatagaggtcgaagaaccaagtttgacacagaatcaaggaatttcgatatgttactgcaaaagaatccaaagaactgttatgctttattaggaaagggtaaattattcttttatagacaaaattatattaatgctttgaagattatttcaaaaagttttacaattgaacccacttttaagacctgatccaagaattggtattggtttatgttattggtttttagatagaaaagacttagcaactcaagcttggcaaaattcaattcaagttaatcatgacaacaatttagaagctaaaatcttgatttcaattgctaaatttgatgattgtttcctaaattccacatctgatgaagattttaaagctaaatatactgaagctatgtcattcactcaagcatcttataaggaaagtccaagaaatgaagtcattcaaattatcctagcatcctatttttttgctaaaggtgatatcaaagtagttgaaaatatctgtggtaaaatttttgatgataaagcatcaaccaattttgttaagagtgaagcactgttttggttagctagatgtaaattagcttctggtgatgttttacaagcacaaaagagtttctctgactcaattaaattaaatgataataatgtcttagcaagaattggttattcgcaatgtttagttattagaggtgaaatcaatgatgctattagaattttagaaaaaatccatgaatcaaactttaaaattttagaagtcacttatgcattaggtatgttatattcaaagatagaaaaatctaagaaaaagtccattgaatatttagaaaagtatgttaaagttgcagaggatcaaaatgaaccagtttcaactgcttcatggataacattagctaaactttatgaagaaattgatatctctaaatctttagaatattcaatcaaggcaaaggatgaagaaattgcagctggtaaatctgatgaagaaatttcagcaatcttgtttaataatattggtgttttcacactattagagaatcacccatctggagctgaagaatattttgaaaaagcttataaaaatgtcaaatatcaatatgctgatgatgaaaaggctgaagaggctttagaaataacacttaaatataatattgctagagcaaaggaacaatctaatgattttacaaaattaaaggatgcacaaaatatgtataatgatattcttgaaaaatgtccacattacacaaatgctaagatcagatggttaactattgcatgtttaactgaagataagaatgtaaaagaagaagttgaacaacttttgaatcaagaatctgatgatatggaagttagatcattttatggttggtatttaagtagatttggaaagaaacatggtgttgaaaaaccaaaagatttagaatcagatcatcataaagaaactgttactaaatatgattcacacgattgttatgcattattgtcattagctaatgtctactgtacacttgcaagagaaattaaagatcaaaagaaaaaagatcaatattatatacgtgcaactcaactttatcaaaaagttttaacattagattctaagaatgcatatgctgcacaaggtattgcaattatatttgcggaagaaaagcaaactgcattagcattagaaatttttagaaaagttagagattcattaaacgatattacagtttatttaaatatgggacattgtttattagaagttaaacaatttgctaaggccattgaatgttatgatttagcattaactagatttactgatggtaaagatgcaagattgctaaattattttgcaagagcgtggttatttagagcaattcatgaacgaaatcttgattatttccaaaaagctttaacatatgttaacaaatcttttgaattgaatccaattccatcatatcaatttaatattacatttattgaatatcagcttgcagattttataagaaagctaacaccagcaaagagaaatatggaagaccttgagaaatcaattaaaggtttagaagattctattgttattttaaattcaatgacagaagactcaaatattcatgcaccatatccaatagaagatttgaaaatgagagtaatgatgggtaaatcattattaaaacaattagaaaaagcacttgatgaacaaaaagaatatgaaaatacattccaaactaaattaaaggaagcaaagaaattaaaggaagaacaagagagacaaaaggaagaagaaagattaattgaagaagaaaaacgtaaaaaaagttgaagaaaaacttcttgctgaaagaaaggaacttgaacagcaacaagcagaatggaatcttcttagaatggaagaagaaaaggacaatcaagatatgttggataaggatcctgaacctaaagaaaagaaaaagagaggtagaaagaagaaagaagatagtaatggagaagaaaaatcatcaaagaaaagaaagactactaaagttgcacaaaagaaaagctcattatcaaaagaattcattgatgatagtgatgatgaagcagaattcagtgaagggtatgacgataataatgatgatgatgatgataacgttgaaggtgatgacaacgataatgattcggattctaaaggaatctaatgcagaaacaggaaatgttgaaagaaagaaagctgcaatatctgatgatgaagaagatgatgataatgaaggtgataacaatcaagacgataatgtttccaaaccaaaaattgttgatgatgaagaagaggatgatgatggattattttaaaataataacagtcatctaatctgtttaatatgctatttcataaactatttgtatcatattactatattactatattatataacttatataatttacacgattgttaagaagattgtgtaagaactgcaaccaatttgtatttttaatactagatcataaaagaagtctctaaaaaacaataacattcacaatcatatattataataaagtataatacagtatagatcgtataaatactcatctttcaaatttctttgatcttttatcgtgaatttctttcttcttatttaaaacttcggtttcattagcattaaaactgatatttgtttcttggttgaaaggattttcaggacttttttgaaattctttataaattaattgttccatttgttgttttcttaaacctggatgttctttcttaatttcaggtaatcttctttcagtatattctgctaatgcagctttaaatcttctttctggatgtctatctaaatctttatttgaaactgcactaccctttaataaagttaaagcagctaaggaatcatctaaaccatcggcactaatagtagtttttggagtaaattgattgagtgcatcatctaaaccattgccctttttatgactcttagttttaccacctcttttagatttaattgaagattcttccatttcaagtaaagcttcacgttctttctttttgtctaattgttcttgtttctttgcagcttgttcaagttgtttctttgaaggtttctttgcaccatcatcccaatcagaatcagaatcgacttgtgctactggctctgtatttcccttctttcctttctttgccattgtttgtgtttggttaaaaaagaaggcaaaataatcaagtgacgtgaaaattggccattgatcatgacgattcctgtcattttattgaataataaattttcggtggcggcgcagcagatttacatagcaacttaatgtattatatcggttgtaagagacatagtttatgtacaggagaaaatagagtagcaaagactgatttaataaagaatcatgtaatgtggatcaatgtagagaagaataaaatagaatagaagaaaactatatacgtttataaccatcatcgagtctcatagttaaatgttctaatgcagttaatggattaccattcttatctaaggaatagcaattaccgttataattctttactattttagaattaacaggtgataatatactttcatctgaaggatgacaaaagaataccacagaataacgttcatttttagttctaaccctatgtaaaatacttttcaaataaccatcagtccaaaagcttaaaacatcagatatattaacgataagatattcatttaaattatcagattcaggtattttaatttcaatccatttttcaccatcaaatacttctaaacctaaacttggtctttgtaagatgaatgtcattgaaccataatctgtatgagcaccagctaaaactttatcagtttcatttgaatcgattgaatccattgaatcaattgaatcaattgcattataatgtacgaatcttaaagttgaatgagttttcaaatctaaagcatgagctgatacaaaatattcatgatctggattaccattattatctcgtatatctaaagcaattgctaacattctacaaatcatatgtaacataacataatattttcttaaagtggaagatataaatggcatatttttttgaaatattaatggtaatggttgatttggataaaaatttgataaattaaaatgagttatattaaaagcttccttatcatcaccttcacctgtaccatcttcttgtaaatcttcaacaaaaggagcaacataacctgcattatttgtagttattgggagttcatttttaatttcagttggttgatcaaagaattgttttgaaatttcaaatagtttatcaatttcagtttcttcaagtaaatgatttttcaataataaaaatccatgttgagatgcagcttctaataaagttgcacaattactttttgaagaatctgcaagatctataattggtaaattaaaatttgtcattataatcgtatatatgccagaaattagaaggtgaaaaaaattgagttaatttacgttattatgtgatgaatattatatggatagctggctgatagaagaaaaatgggctgtaaatgatatgtattgccaattggggggtatacgatataatactttacagtatggtaaatatagtatacaattgcagttaatagaaaatagctaaatattacaaagcaatagccgtttcattaatgttttaagtaaaaaaaaatttcaagaataaaatgaaaggagatgatgatgaagaaagtaagtaatcaaaaataaaattaaataattttttcaataatgaaattgaataatttctatattagtgttaaggttttgtctaacagtaatatatttaataacttagtttgcaaagagaaaacaagttgtttaattaccgtgtgtgaattgtaatcgtatatatctctaatgttatcactttaattgagatatataatcacactttcaacacttatggaagtatgctttatttttagtaccgcaatttatttaaactatttttaattttgaataaaattacttgatatgatctagaattatgtttaagctactgtactacctgctattatgttattactaatttctagtttacgatgtaaaatatgtctcgatacgctgagtaaaagatacgacgtcaaagataatcacaggatatatggtacaatagaaacggttacagtctatgcaggtaagttgcattaaattaacaatataataatcaaaattgttttgtattgctttgtattgttgtataatataggtccagagtcaatttttcaatttaaattaatgataatattatgatgtgggataataaatagccggggtatttgttatcagcttccgctttctttccggtatcaaataaattgccgatggtttcgatttcttgttgggggtgttttcaaaacttaaaatggtctttaccactgggctatgaaagtgaaaaattttgggcgacaaaaatggacggttgtatgtagtgcaaaaaataggtcacgtgatctgcattttttaaaaaatatattaaatattttataaatgattaagacaaattataaaaaataaaaatatttcaaaaactgcaattaagttaaaaataattaacattaaacagtgtttattttagcacataagcactcactaagcactttgaaatactaagttaaaaagcatacagtttggaatttatttacaggattttatatactctatagaactgtgtacatgtaagattttatacattttacttatatcaatattattaaactcataatgactcacttgttaacaatattgaaccttccattaaatcaatatccttaataattgcatcattaattatatcaccaatttctaaattcttagttttagccttactttcatcaacattagtcttattatcacttaatgcataccaactagtctctaaaatacatctaacaccataatctaacattataacttcaatcaatccactttcacttggttttttagttataattgctttaaatttatttttggatttatccttttgagcctcttgtaaatattttagggctttgaaagtataaaatgctgtaactttatttgaaactttattattaatttcatctttatattttaaatgtaatgaaagataattaatattttcttgtgaaaacattggtttaccttcattaatatatgaatgtaattgccaatgattaatcaaatcccaaaatcttcttaatggtgatgtaacagttgcataactttcaatattcaaaaattcatgtttagccgggaatggtgatatagttgatttagttaaatattcttgatataatgtaatttctttgaaacttgaattcttcttatgtgttatcttatttgcaaattctgaaacaatttctgatttttcaagtggtacttgaattttataaattgcaggtatattattcttcttgaaaaattcacctgcaatactatttgccataaccataatttcagaaactaactgttctgatcttgcacctgtttcaaatgcatcttgaactgtatcatcattatacaaatctttgaaagttagttgaatttgtttattatcagtttcagtaatattttcaatttctttcttaacattaacttcatcaaataatgaaacacgtccaccatcaactgctttaatattcaatgattgtgaaattaaacttaagttttttaaatcatccttaatattatcaatgttaatacctagtgaatcatcacatttagtatttatcaatctattagattcatcagattgaagattagttaaaactttattaactgatttataatcaattttaacaaatttatttgcaagaccaaatgaaattgtttcgttatcttctaatggtattactttacaatcctttgtattgtatttgaatgaaattttcaaaactcttgttttattatctgaataacctaattgaatttttttaccaaattcaacaggtaataaaggtattgcatttgtacctgataaatctggtaaatatagagttaaacctctttcaaatgcaatttgtgaagtcaaattattaatatttaaatatgatgaaggatctgcaacaaatgtacttataataaattcattttcattaatttttttaattgagacaccatcatcaatttctaatggattttcagaatcaatacaatatattatatcatcaaattctaatcttttattcttttcaatatcattattcaaattaatataatgttctaaattatcagcagttattgaatcataatatgattgttcataatcacatttaactgaaactccactaaatggaatcattgaattatcccaccatttaactggaccttctgtattttgaatttcaccagtatttgataataaatcataaacgattgaattggtaatatctaaatctttataattcggtaaatttctcatgattttaataacgaaagattcaagtacactattttgaactgaacctgcacaatataattttaataattcaatgaatgttttataatatggtaaaatatgttgaattttagaagtgttgtttttagtgatagtaatattattgttagtattattatttggaagttttgaagagatatactcagctaattgtgtatataattgagtatctgctttaaaatcttgaaccattttatgaaatttaacatttctatttaatggtaatattaaaacatatgaagaagttttactaaatgaatcatgtgaatataattgattgttttttcttaaacttaaaatgaatgcataaaaattattaaaattaacatttaaatccatattagccttaccttgtaaaggtttacccaatgtgattgaatcatattgattgccgattgataattcttttgatattaaattaaataattttttatttgatttttcataattttcaggtttttgatctttaaattctttaaataacatttgtaaatcaattaattcaactgcattataaatttgataaagggttaattgaattggtgattcattactttgtaaaatgttatgtaaaaattctaatttgatattcatatttggtaataattgccaagcttgagttattatttcagtcaaaatttcagatattaaacctgataaaattgatggtaaaataaaagtttttgcagcattttcatttgaaattgatcttgcaactgcactttcaaaaattttatttctatcaataacatcctctaatttatattttggtttaccaattggtataatttcatcatcttcatttaaatcttcccaaaaaatttcttcatcatagacacaatttttaaaccaatcttttgggaaaacatttggaattcttaaacccattttagatcttgaaacaaattgtaattcaccatatgagttaaccagtgtatatcttggatcatcaattgtattcggtaattcaataacgacagctaaatcacttttttcaaaattacctgataaatcaactacatcaccaactgtaagttctgaatattgtaaatctttccaatggaaacttttattaattttaccaaattttttaattaaatgatgttttaagaattctctatttgaactatcatcattaaaagtaaattttaaaggtaaattaatatcagggaagacttcagttatccatttcttatttggtttaatatatcttagatctgttctttccttaacttcatttcttaaattatcaatatcaacatttgaagcttgcattagaagttcctcgggcgtttgaattcttttatttattggtacattatttcttttatttctatatttagtaggattacctctataatttactgtagttgatgtgaaatgtcttgaaaatgttatagaatgcgcaagtaaacatttctgctgtttagccgttaaactaaacaatgttctagatctactagccagcattatttatccttatagactatatgaaattcagatgcagtataatatctagtttaaagttattgaaaaaaaaatttgatatttcaaaatcttaaaaatcatgttgaaatagctttaaaaatttaatgttatgagagagtttcccttttaggaaggttatgcgattatacagagtctttaagctactataagttacttagaatatactatcaaggacgttattaatggtagtggatgattgtttggtcttaatattatcatcagcatcagctctgttggtagcaacatttctttgtttaaaatttcttcgtatttctttaggtttatgatcattattagtgttatcattgttactatcatcttccaatttacgtttcttactttgtttaactctcttgatagttttacttgtttcaacatttttaatataagctttattaagtttatgagcttgagataattctgcttgtttcttactttcacgaacttcaacttctctattaagtgcattagttaaatcaaaccatttaaaaccttttaaatatttaacattcataacatcatcatgataaaaacttctctttttaccacctaaaatattaccatttagagtatttgcagctaattttgcattagctttatcagcaaattctatccaaccttcatcaaatttcttctttttattaccaccagatttaattcttgatttataaacttttggatcttcaggtttgagaaaattctaccaacttcaccaaatcgactcataatttgtcttaatttttgaggtttcatatatggtggtaatgaagataggtatacaacaccagttttctttattctcctttcttccttctctaattgttttggggttaattttttaactttctttgtaccaaaagttgtactaccagttaagtttttttctaaaaatttagcagtttcactaatgtcattattatctttatcttcaagatcatcatgaagttcatcctctatatcatcatcaagatcatcaccgtcatcatcactttcattttgagatttatcaagaaatgagtttgctgattttttagttgaatgtaattcattgtcaaagtcatcatcatcatcatcatcatcatcacttccattgtcatcattactatcattttcatcattttcatcattttcatcatcactatcagtaccgaatctgtcaaattgttgtactttatttttactcaaacttaagtttttattattagactcttcatcagaagaataaaagtcttccacatcactctccaccattgattgatatatatattgatcttaacctatgctatttacagtactacagacattaacttagtgaaaagtttaagaaaaaaaattttaaatttaatttaatttaatttttcatattttactatgtaaaataaagaacgtgtcctaaataggcaagtgaggcgatctctctcttaataataacctttccatttacataccatttcaactgcacaggccccccaatcttcaccatgattatgcattcctggtgatattgcagctctctgtaatgcctgttcttcagtgagacatgtaagtaccccgaaaataactggtttattaatttcaaattgtaatttcattaattgtgatgaaactgcatcacaaatatattcaaaatgcattgttgaacctttaattaaacatccaattggaattacaacatcaacattatgtttattaaacatacatttagttgcaaatggtaattcataggcacctggtacactctcaataattatattttcttccttgacattatatttctttaattgtttaattgcaccataaaccaatgcatcaataatttctctattccatctagcgtgtacaatcccaacacgaatttgtgatccatcataagtaccatctatttcacctaatcccttaactgccattctttgtcaatatttaaagagaaagaatacttaataatacttagtaatacttagtaatagtaacagtagtagtagtttataatacacgcgaatagtacaggcagtctagtattacaatcaatttcaatttaatgatcatcttctaccgggtgttgatggtacgacgtgtcttttggaggattaatattagtagcaataataataataataataataacagtaagagaatgaagtattacgctgtgagaaacggtcacaagtctggtgtttacaataactggtcggattgtgaaagtcaagttaaaggttattcaggtaatcaatataaatctttcaactcaagagctgaggcaaatgcttatatgaattctggtagtaatagtaatagttcaagatctagttatagatcttcaagttcaagttcaggatcaggatcaagatcaagatcatcttattcaaattcaagttcaagttctagagcaccttactcaaactcaccttcaagatcatcatatggttcattaaacgcctcttcatcatcatcatatggttcttcaagatcatcatatggttcttcatattcctcatcaagctcatacagttcatcatatagttcaagttctagttcatcatcatcatcatcatcatctagaacagttaatatttacactgatggtgcatcaaaaaataatcaaggtgctaaacaaggtaaatcgactgcaggttttggtgtttattatggacctggtgatagtagaaattacagtggtcgtgttaccggtgaacaaactaataatcgtggtgaattatatggtattcataaagctttaaaaaattctgttgaagaatcaaaatcatcttctaatacaaaatattttattcatacagattctcaatattctaaagatgcaattactaaatggggcaatagttgggaaaagaatggttggaaaacttcaactggttcagatgttataaatcaagatgttatcaaagaatgtagagatatggttagaaccttaaaatctaaaaatgtcgatgttgaaatcgttaaagttaaaggtcattcaggtaatcatggtaatgatcaagctgataaactagcagttgaaggttgttcaaagtagtactcatagtatatagttattgtacatgtgtgcttactttacacaatattaccgtccatcaatcatcaacgtgataacatgacgcgtctgttgccaaattctttatttacttttcaaatagatcatgcaattgattgatctttcttattttatgtcttctttttttctctcctctcctatcttatctttctcttaacctgcttattatatgtaactaatgctagatagaaacaataaacgacaggtatgctttaatgatgcacttaatgatgataataataataataataataaacgtatgaaaattatcaataatgatgataacggtgaaattgaaaattttgcagttttaacaagtttagatgtatcaaaatataatgatattaaaataccatttaaagatgttgtcaaaattggacgttcaacttcaaaaaataatgatattattattaaaaataatgatgtttcttcaattcattgtattttcaaaataattcaacatattgaatcaaattttatttcagtacaggatttaagttcaaatggtactttcgtaaacaatatcctaattggtaaaagtaatagctcaatattgagaaatggtgatagattatcaattgcatcagatttacactatatagttaactatgaaaataattttaaacctttgaaaacttcattttttgaaaaatatatcttaactgataaaatattaggtacaggtcattatgcacaagttaaagaagctaaaaatagacaatctggtattgtttgtgctgttaaaatctttaatccaacttcaaatcatacacaatcagttcaattaaatagagaacttgaaattttaattaatataaatcatcctaacattgtaggattttatgatacttttattgaaccaatatcaatcaatacttcaacaacttttcttgtattggaaaaaattaatggtggtgaattatttaatagaattgttgcaaaaggtaaattaagacaaaatgaaacaaatgaaattataaatcaattattaaaaggtttacaatatttacattcaattgatatagttcatagagatttgaaacctgaaaatatattgttatcaataacaccaactaaaatcggtcaattatcaaatgatccttgggacgaaaatgaattctccattcaagtaaaaattgcagattttggtttagctaaatttattggtaaatttcaatttacaacaacattatgtggtacacctgcatatgttgcacctgaagtattagaaaattcacaaactagaaaatataataaatcagttgatatgtggtcagttggtgttttaatttatgtttgtttatgtggtttcccaccttttagtgaagagcttggtccaccttcaatgagacaacaaatttctcaagctaaatatgctttttattcaccttattgggatgaaattgatgatatagtattagatttaatcagtcgattgttagttttaaatccagatgaaagattaactgttgatgaaacaataaatcatccatggtttacagcaaagaaacaatcattacccattcaacatctagatagaatacagaattcttcagggtatgattgtgaacctataacaattcaagaacgtgctaatactggactaactgatgaattgatagctcaaaaatactgcaaataaacttagaaactgtaatttattaaaaagaatattatattgatctaatatatatcacatatatatatatatatatatacactatatacatttactttatttggtaaacaaaaactttaccgtcttgatgaccaataaacatccatctattagatatttgatcatgtctatttgttttgattaaatttttactcctaccattagagtatttaataattattgatgaaggattttcaatttctttaacatttaattgattagctgtgaatctaacaatacttgctctttgtaattgtattgaattaatctgttgaatatcttcatcattattaatattattcgagatagatggtattgatcttcttgttttaaaaataaattttaatccaaattcttcatcatattgatatactctcgtatatccatcccatgttatcaatgcaacagaacctgttttcaattcaacatcaatatccgcaattcctttatgtttaatatcatatgaaataactgatggatcaataatattaccactatacttcaaaataatcactctattaccagttgaagaaacaattatctttgaatttctctcatcaacatgaatacatgtaattggattacccaataatgtttcattgatgaatgtttctttcgttttaccatcaatgatttcataacatacaacatgtccactttcataaccaattaaaaaacatgtatcattcaaccattttattttcataataacacctgtaacacttctaccttcaccttcaagactgaattttacattttgtaacaatctttgcatttttttccattcttcatcttgtgataaatctaatttataaatatcaaaaccatcagaatcaacagttgcaggtgtaattaataattgattatttatatcaacattagtaaaatttaacatattaacaggcatttcaaattcaacttctggaattctctctccaatatcagacaatcgtttaggtaacacacaagtatatgtgaatcccacatcatttaattcaaccaatttccaaatcttaattgtaccatcctttgaatgtgttaaaattttaccaaattcattttcatcaataactgaaatcacagaattatcaatatttacccattcaattcccagttgtttcactgtaagtatactttcatcatgccctttccaaatacctaatggtcttttagttattaaattccaccatattataatacctgattcatcagtagttaataatgttgttgttaaaaaacgatgatttttcccacaaatttcaacaaaagtatcagacggaagataaaatggttcaatgcatgttataggtgatttatgcaatcgtaacgttgtcagtaactccttttcaaaggccattttgaccatttaatcgtagaagagatcaatgaagtatagttgagttaagtgaaatattacgtaaagaatcttctattataaaacactcatgtgcattaatacagtttaaggttagctatataaaatgttcattcaattatggatctttatacattactttaaaatgtggaattatatctagacgggtagttccttcaggagggaatgattcattgatggatatgttattctcattttttttcaatataccagattcaactaattgtttgattattgaatttaatctatttgatgacattgagcaaacgggttttaattgttcaattgtaagggtatcaacattctcaaattgtaataaaatagaagcctgaaatatattacattttaataaaacttttttgtcatttaaattaacattcatttcaatcatattgtaatgattgtttaatttacatattttcttatccaattcattgtaatgactaatcattgaatgtatagattgtttaatctttggtggagttttaacacgtttgttcccttggagttttatatgatgtgaatgataaactggtataattgaaacttctatattttcaatggattttttaagtaatggtcctttagaaattgctcttaatgcatctataaaaggagacaattttaaatcttgtttagaataaaaccttatagattggtaaagatattctattttaacactcctagtttttcgattcattgccatacaattgtcagcaagcaattgcctcatatgaataaaaagtttgtctaaaacttcctcatataataatggtaatagcatttggaaatatttagatacgattcctttcattgtatctaatgaaggttttatatcatcattatctataatcatcatcatgtttgaccaaaaaatttcagatgaattaagtcttaataaacaatcttcgttggtaagctttaaaacttttccaaaataatttgaataaacagttgtatttttcttattttggaatgccaaattaaatccaattaatgctgaatgttgtgcaatttgaaatatcttaccaaatcttatgaaatcgcagtatttaataataatatgaaataactctaaaataattggaaaattacctgttctacggtaaattctattattatagaaccattgggataaaaaaacagaatttaagagatcaacaaagaaaagatgataacaattattaacatttatttccttggttcccaaaactcgattagattcatttgaagtaatgtaaacttgaacaagtttttctaaattatctttaaataactccaattcatttggtttaatttcaaatttcagttttactttaacgccatcaagtttgttatcactacagaaagcattataatttgccaatgaacttaaaaactttgaaaattttagtattatatcttgatcataagattttttgaaaataattttaactatattattgtaaatgtgaccaatacatgttaaacgatttatttgaataattatttctttgttctctgactcaataactttagttaatacttcagtcaatgcagtcagtttactaataattgatttacttttcaaaagtatttgtaaataatatgagaaatctacctgttttggatgcaacgtagtacatttaagtaatttattactatctttatatcctccgttattagttatctcatttggtccaacaagtttaccatcaacaattttccattgatcataagacaccggattcttttcgaatgtctgtggattgaatgttaagaagctcattgctgtatgcttaaaaggaagaaaaagtttgtgatatttaacatgctataagtaatttttgaaattatcataatttcatgctcttcttagctttcttttatgaggtgatggatttcatcaatggtataaaggaagtagaagtcattaacaactacaatgacgaagatgaaggatatattacattatatgataaatacggtatgatcaatgaagttgaaaatgaatcaattaagggagaaattaatgaaataatggataatgttgataaatgtgatgatataattgagttttattctagatgtttatataaactacaatttataatatcaattagattcaaacaatttaaaacatggaatgaagttcatgataatagtggatatcgattaaatggaatttatcaaataataaatgaattatttgttgataaatttaaaggtaaatctgaaaatggaattggtaatttaaatactgatctaagtaaaaggatgtggaataaaagtgttttaaaatggggtaaaattattagtaattttgttgtcacagatgaaggtagagatgatgttttacagataggtaaattttgtgaatttcttcaaatcgaaatggattctgtacttgatggtatatttcttaaagttttgaagaatctctatgggaaaatacttagaagtggtgaaaagggtatttttattaaattagctgaatatgaaacaagagctactagaatttataatgatatgttttctgaaggtattttctttcatagtagggcatttaatgaactttgtgatattagtcaagaagaatttaaaacacttatttattttgaatttgttaatgattataaaattaatgagcaatataagatctcaggaaatagaaaatggaatatttatgatgattggccagttgtttttaaaaagtatattagagatacaattgattcaattgaaatcaatgaaaaaagtttgaaaagtgttgttgaatttatcgaaaaattcatatttgaagttgatagattaaagaataaaattaagattgataaaattgatgtaattaaggaaatcacaggtcatgttaatagtaaaattaagaaagatttaagtatgcattatttacattatattaattataagattaaaaatataattaagtataataatagaaatttaatggagaaagagctaagaaaacttacagaaggagttatgttaatgaaacaaatactgggttataataaagttaatataatggagacaagatatgagagtttattatttaatagaatgattgaagttatgaagaatagaaatgagatattagaagttaattggatggattgtgagattgaaatgattaaatcatttggatataataaagatattttaagagagattaaaaatagtaaaaatttgaaggaaggttgggataaatgtaatgaaagagaatttgatgatattatattaattttcaaatataataataattttgataattataatatatggaacaggaaaggtaataatcgtatgaaacttaatttaaaattaagaaatgaaattaagaagttttatagaagaaattttaatcatttagagagtaataaaaggaaaattatttttaaaattgattattttaattcaattatggaagttaaatatggagaagattgtcaaattgaatgtaatagttatgaaggtatgattttagagaatttagatgatggtatgaaagaagttgatattgttaataaattagatattgaaatggagattgttaaaaggagtattgatagattaattaagagtaaagtaataataagaggaaatgatggtagtttaaatgtgaacgaaggattgaccgggtttatagttgttaaataattagatattaaattagatattaaattagatattaaattagatattaaattagatattaagagtgtatttatttatgtaatgtatatatggacatgattaagtgtattaaattaaattaaattaaattaaattatatgacatttttcagccaacgaatgaatgatttaatgaaagtctttttattattagttggtttagttcgtatatcttgagtttctttagagggttgagtgtcttgagtgtcttgtttaggactagattgtgtagattgtatatcattttgagattgtatattatttgatgattttggtatatcctgtatatcctttatagtggtattattattatcatcatcattattattagaaatagaatcagaatctgtatcataatctattgatttaaaattaaatggtgaattatttgatggattatttgaaatattttgtatcttatttgggtttttaaaagaatttaaagattctgaagattcctttaattttaaatcaattgtacgatgaactaatggagaattaattaaatctaaatctattgaaggagatcttttaggtgaagaaggtactgatggaggatgtctatcatttaagtctatagatacagcagctgaccgtttatgacggtgctgaggagggtgaagcatgtatatctttgaaaaggaaaatataacaagtgtttctaataatatactataagtgataaaattatgtaaatgtaccaaatattttcaaaattacttgttaatataagttaaactatacgaacatctataaattatataatataacgcatatttatacaatatactatactatatataccctacacattacctgaaactaaacgtattaaatcttgacctctttgcttataaagttgttgttgctttgcatgacttgttacaggtgcaaaatcatcctttgaaggttcatctctaaaagaggcagctttaccaactgttgcatggaaatgatttgacagagcgttttgtacctgtgacatattagccagaggacggtaattgcatggtgttgtcggtactgacatagtggatactccttcaattatagaaaagacctatagtaaaggaaatatatagaaatggtataacttcgcaatgagtggaaaattaaaaatttattggttatcagctacttctcttatctatttatctacgtcgaagtacttctttatctttttttatgaatcaattgtaaagcaatgaagtacttcacaccattggatgtacactatgattcaagtatagatcctgaaaatatggatcaatacaagactaaagattataaagctagtactgtttatgctatcaaagataataataataataaaagcagcaatattaacaattatattaattatactaattatactaattataaatactatataccattaataagtttaataattatttatattttacatagtcatttatttaatctattataatgccattcaatatgatctttcataaaacttgaaacaaaataataactatgatcataacctttaacaacatttaaatcaatttcccaattagttccctttgatgcttcaactaaattttcacatcttaattgattatcacgataattgaaaacatctttatcaccaacatgaataagtatatcaccttttctatctttattaatttttttaattaaacaacatggatcatattcttcccatttagttttatcattacctaaataattaccaaaacatttttcaccccatggtacaatacttggatttgaaattggtgcaaatgctgaacatgatttaaatttaccttcattacgtaaatgcatcataattgcaccataaccacccattgaatgacctgtaataccacattttgatgtatcaataattgggaaattatcattaattaattggaaaatttcagtattaatataactatacatattataattttcattccaaggtttattaattgaatcaacataaaatcctgcacctgtaccaaaatcccaattatcatcttcaccttcaatacctgcaccccttggtgatgtatcaggtaaaacaactgctaaatttttcaatgatgcaaaatatataatcattgatttttcacttgcattatcaggtgtacaagttaaacctgataaataaagtataaatggaattttctctgattgtttaataacttttggaatgaaaacattaactttcattaaagttttagtaaaagttgattcatgttcaactttatataatgtaccatcattaactgcaatctctgctgtaatcttcatcccgtgtatttgtatattactctaaggaggaaatattaaagagaaatgaagaaagattagagagaccaactctatttaaatagccataaagtagaactacgctcgcaaatacttacttaatagagaaatggtatcctatattatattattaataatatcatttactatattcaccacttggttcttttgaatagatatacatagcatatacaggacaatgtttagacaactatttagattaggtacaaggagatggattagatacagtgtattaactgcatcaactatatctgcaggtattacattccctattgtatttaatgatgaaattaaaaatttaagtaaattatcaattaaatatcctgatggagtaccatttaaggatattgataatgtaccactttcattaaattttaaagataatgattatacattattaggtgcaggtacaagagaggtatcatttttaaaatttcgtgtctatgcattaggtttatatattgaaaacaagggcataaataatggtataaaatttgatgaaattttaaatttaaattataaatatgttgctagagtttgtgcaattagaaatactgatttatcacatttaagagatggatttgttagaactattaaaaataatgaattatttaaagaattatcatcaaataatgatgaaattgatgaaaaattatcacaagctattgataaattacgtttatcatttaatagtgttcattgtaaggcaccacgtaattcacgtatttatgttgaaattgataataaaggtttaaaattttcaattgaagttgttaataaggatggtaaaacatttaaacctttaatgaagattggagatattgaggaaccattaatggctaagatccttattacatgcatacactgatattaataaaccattgataaaagatgtgcaaacaagtgtctatgatagtataaattaaataaactctgtgtatatatggccgcatcgaaggaagtatttcttctttccaaaattccgcaagttaaattctttttcattatttcattaacaaggacttaaactttccttatatccttttaatctgggggcaagtataggtaattacaggtaatgacaatgaataaggatattatagaatataagaaattacgtcgtaaacataagaattcaaagaatggttgtttagattgtaaacaacgtaaaattaaatgtgatgaaaatttaccaatttgtacattttgtcataaaaggaaatattaattgttcttatttaacaatgactccttatcaaattaatcaaatagttatttgtcatagggaaaatgataaaaggagaaagaaaaaaagtttaattaatagtatagataaagaatcattatcatcaatttcaagcttcatcatctgataaattagattatgaatttgatgtcaatgtcaatgtcgatgatgaggttgatgatggggaatattatgatgattatggaaattatgatgaagaatatattgcaaatggtcaaggtcaaggtcaagttaataataaccacgatagtgattttgaagatgaggatagtgatgatacaattaattacattaaatctaaatcattcaacaactcatcatctagctcatcagtactgactgtatcacctgataattttcaatcaccagattattatcatcaaacaaaggaaattaatttacgtactaaaggctcaacaatggacaatgtttatcatgcacatgaaatggaaggtattttattacctgaaagtatgggtaggaatattaattttaataataatacaccaaaatatcttcaattatcaacaaaattcaatcattataattataatagtactaataactacaataataataataattataataatagtatattagatgaaggtttatttaataatagtaaaatagttaacaaaacatttcaattaaatagaactaaagaatttgaatatttagatgaatttatcgaagagagtgaacttttacatgaagcatttcatagacatgatttttattcattactgaaaaaatatggtaaagataatattgatattgaattagttaaagttcattggcatgtattatcaattgaaacagttttcagtaaattattaattaaatcatcaatgttatattcattagattattataaaaatgttatattaaaacaaaagattttaccattaattaattatgaaattaaattatcaatttcatgtaaatgtgagaatgaatcagttgaatcaattaatgaaattacaaatataattaaaaacgattatataacgaaatatcatgaatttttaaatgcaagagttagtatattactgggaggatttttaatattaaattattgtttagcatatcattttaagaatggtatgaaatatgatatgaattatttagaaggtaaaaaatctgttaatttattaggtatattttcaacgggattatattcaatcataatggaacgttcaagagttgaattattattgaagaaaattaatatattatcattaattttattaattgattttaaatttttattagttaaaaattattcaattgatttaattgaagattttaagaaattttttgagaagcataataataaatttttaaattatattgaatatgaaaatttaaaaatatttcttaataaacatataccattattaaggaataatttaacgaatggtacattattaaattataataatggatatttagttagaatacttaattcatttcaatcaattataccatatgatttttgtaatggtaatttaaatttaaagaataataaaatttttgaaaatgatgaatataaaattataatttatttaatgtattcaacaatagcaagtatattagcatcaacgattccatcaattacagcattttcatcaaatggattttatggtacaggatggttaatgtataatattgaaaaatcatcatatttaatgaaaatttttaatatgattaaaagtaaagaattaaagataattgcaatttatttaataaggttaagaatttttttgaagaatagatataaaatttatgaaaaatatttgaaaaaattgaaaattgataaattatttgatagtgaaatttcattagaggaaaaatatgatgaattaattaaattaaaatttcaagatggaggtataatgaaagaggaaatgattaaaagttttctattaaataagggacaatttttcaaaaagagtaattatcctaatgttaaagttgattattttagttttaacattagtttgaataatatgaaaactattgaagaaaatgggaaggaaagtggaaatggaaatgggaatgggaatggaaatgacaatgataatgacaatggaaatggaaatggaaatgatattacaaataacaataataataagggtaaaaataggataaaagtatcagcaaataagataaataattatttcaagaatgaagaagaaatgattgaagattttactaaaagtaataatggattatttagtaaagattataaagaatttaatataccaagtgatagtattgcagaggaagttgtacatattgatggtgatgaaatgaaatcattatggaaattattagtttacataaggattaataatttataagaaaagaaaataagagaaaggaaatgattacataagcagccacgtgattcaaatattacgtaatatacatataataaaaactccgggacttataatttccttctaaaagattaagatgatccctctccccggagaataaatgcccaatttgataaatttgttattattattattattattattattattattattattatagttatgattgataattatgattattataaaagggagtgcttatcccacttttttgtttatggtctcttcttctttttcttgtatttatattaaacaaatatcaccaccatcacatatatataaatgagtgaatctgaaaatattagaactgatctgataacattaactagatttatcattgaagaacaacaaagacttgcacctgatgcatcaggtgaattatcacttttattaaattcacttcaatatgcttttaaatttattgctcatacaattcgtcgtgcagaattaattaaccttattggtctctatggtcaaactaattcaactggtgatgatcaaaaaaaattagatgtaattggtgatgaaattttcattaatgcaatgaaaggttcaggtaatgttaaagttttagtatctgaggaacaagaagatttaattatttttgaatcaaattctggtaattatgcagtttgttgtgatccaattgatggttcatcaaatttagatgcaggtgtttcagttggtacaatattcggagtttataaattattaccaaattcaaatggtacaattaaagatgttttaagatcaggtaatgaaatggttgctgcaggttatacaatgtatggtgcttcagctcatttaatgttaacaacaggtcatggtgttaatggttttacacttgatactcatttaggtgaatttattttaacaaatccaaatttaaaaattaaagataataaatttatttattcaattaatgaaggtaattcattttattggtcaaatgaaattaatgattatattaattcacttaaaaaaccttgtattgaaaataataataaaccttatagtgcacgttatattggttcaatggttgcagatgttcatagaactttactttatggtggtatatttggttatcctggtgatagtaaaagtaaaactggtaaattacgtatattatatgaatgtttcccaatggctttattattagaacaagcaggtggtatggcagttaatgataatggtgatagaattttagatttaatacctgaaaaaattcatcaacgtagtggtatttggttaggtacaaaatctgaaattgaaaaattattaacttttattaaaaaataaaataaagtaaaagtaaaagtagtttatataaaatgtttaatttatttatttatttaaaagaaagagtccattgactggatatattaatgattgtagttataatgataataataataatacaaagagatctacatctctatatgaaaccttaaataaataaataaagattcaaaattagaataaaattccctcgacgtgtcctcttagttaacgcatttttctttgaaatggacatttcactttttcttcaatgttttctttctctttctactgctcttcttttatttccttttgtctcttttactatagccaattgaacaatgagtgggtttcgtgtattagatctagttaaacctttccaaccttaccttccagaagttttagctcctgaaaggaaagtaccattcaatcaaaaaatgatgtggacaggtgttacattgttaatttttttagttatgagtgaaattccattatttggtattacatcaaatgattcaagtgatccattattttggcttagaatgatgttagcttcaaatagaggtactttaatggaattaggtgtttcaccaattgttacatcaggtatgattttccaattattacaaggtactcaattattacaatttaatccagaaaataaagaagataaagaattattacaagttgcacaaaaaattttagcaattttattatcatttggtcaagcaactgtttatgttttaactggtatgtatggtagaatatcagatttaggttatggagtttgtcttttattaattttacaattagttttcgcagctttaatggttatccttttggatgaattattacaaaaaggttatggtttaggttcaggtacttcacttttcatgtcaactaaaatttgtgaatcaattgtttggaaatgttttgctccaactttagttaatatcggtagaggttcacaatttgaaggtgcaatattaaattttgttcatcttttatttactaaaaattcaaaaagatcagctttaattgattccttttatagagataatgcaccaaatatgtcacaagtttttgcaactttaatcatctttgcatcagttgtttatttacaatgtttaaaagttgatttaccaattaaatcaactagacaaagaggtcctttcaatatttatccaattagattattttatacttcaaatatgccaattatgttacaatctgcactttcatcaaatattttcattatttcacaaatgttatattcaagatttccaaataatttaattataaaattaattggagtttgggaaccaagacaaggttcaggtcaacaattatttgcaatttcaggtttatcatattatatgcaaccaccatttaatttacaagaagctttattagatccaattaaaactgttatttatattacatttgttttaacaacttgtgcatttttctctaaaacttggattgaagtttcaggtacttcaccaagagatgttgcaaaacaatttaaagatcaaggtttagttattgcaggtcatagagaaacttcagtttataaagaattaaagaaaattattccaactgctgcagcttttggtggtgcaacaattggtgcattatcagttttaagtgatatgtcaggttgtttaggttctggtacttcaattttaatggctgcaacaactatttatagttattatgaaatggctgcaaaggaaggtggtttagttaaatcaattggtactaatttctctgaataaatgctaccctaaaatatataaagtattcattcaaaatatagtaaattaacgtatattatatatcatattgtatataagtaactttttataaaaaaataaattaaaataagtataaatgaagttaaagtctaagatattatgataatgctgaaaaaaaaatcaaaatttcaaaacatgaattcttactctatactaattctttctttcttttatcaaattcctaatatatcaactatggcaccatcaaatcataaacgtattaaacaagtatcaatatctaaacctattctctatggtaacacagcaactaaattttcaaatgttaatccgataccattaaatgcaccaaaagatcatacacataaatggacagttttcgtacgtgatgcaacaaataatgatttatcaacatatataagtaaagttgttttcaaattacatgatactataccaaatccattaagaacaattgaatcaccaccatttgaagttacagaatctggttggggtgaatttgaaattataattaaaatttattttcatagtgatggaggtgaaaaaaatgttacacttttacatcatttaaaattacatccttataatgatataattaatattgatggtaaagttgaaagtattaaatatgatgaaattgttttcaatgaaccaactgaaaaaatgtttgaattattaactttaaaaccaagtactttattagataatgaaatgaaacaaagggagagagatgaattagatagaattggtaaagcaattgatgatataacgaataaaattaatcaaaatgctgaacaatttaaaaaattacatcaagaaagagaattattagttaatggtggtaatgtttaataaaatgttatatgtgtttttattattaaatattgttctctataaatgttatgcattcatgtattacattagataaattattttctaatgaatcatataatatattataatcatatcctaatcgtattttaaccatttctctaccattaccattaaataatataattgaagaaactggataattacctccacctaatggattaactaatttcattaatttacaaattttacccttaggatctaatacaattgggaatgattgttcattaaataaatcataagttggagttataccaataactgatacattatttgatacaaatgattccagtaatggtaaatgatttatatttgaacaatcaaataagaatactaatttaattattttataattctctatattattaatactctttcttaattgatcagaatatggtaatatacaatcaaatgaattaatcaaattacttattgtaaaccattgtattttattattattattaagttgttccttaattactcttggtaaaataatacattttcttttcatttcatcatactcatatgcttcatcatcatctacatattgccttttacgtgatataaatgaaggattacaaattggtggggctacatgaattaaatcatcactatcttcatatttaattctcagatcatataataaatctcttgtcatattaagtgttatatttatagattatagagcaatgtcctttgtgttttgtcgtaggtttaaaagaaaggaaaagaaataacagaaaagaaaagaaatgaaaataataaatagaggaaataaaatagatgagattattataaaaattatctatctatttttactgtgatgataagactttcttttcatttggataaatagcaatggcaaaaccacctatttgtgcaatattcttgactaaatttgatgttcataaaggttatgaattgatatattataaatctattgataatatttatgatagtaaagatttagaattcaaatcaattccatcaggtttacattcagttgaaagtgatgtaatatgttttacaaagaatggtaaaatacctgaatctttattatatggattaagtgttttcaaacaaaatagtttacagttgaaagatgttgttgatagatctaaagttaaaatgtattcattaggcattttaatcgatccaagacatttaaaatcaattgatgaatttaagacttgggatgctaaaatttattcatgtatgtgggttttcaaaacagaattaacttcaatgattagtgaatttattcaattggatactaaagagcaagaagatgattatttgaataaatttgaaagttttttcgataattataaatataagaatgaaatatctaaggtacatttatcaccacaaataacttcagaggatgaaatcaaatctgatcatatggttgattcattagttgatataattgatgatttcggtccattaatttttaaaatttggaaaatttcattattaaggaaatgtataattataaattcaattcatgatggtaatcataatggtatattaattggtgatatttgtaaaattatattttgtatttcattaatatcatcaattccaaaagaattacaggaaaggcttgaaaaatcttcaaagaaagatttgagtgatatgatgtttaataaaccaatttataatatttgtgttaatgatattgatacaatagttcaaatggatacaaattatattgcatgtacaactgatcaaataataactgagaggaaaggtatttatgattataatatattattatcaaaggaatgtcctcaaataattaatgcaatcactggtgataactgaatatgcaactttcagagataatgaaaaattctcaaataatttattcacaatttaatcatgatagtaataataataataataacagtacctctattattcatccattatcatctaaagttagtgaacgtagatcaattcaagaactgatatggacaggactttcatggtgggcaagtgcaggtgaatcatttagttcacataatgaaatatttgcaaatgaatatgaatttttcgataatatttcaaactgataaagttgaaagattaataagtttagtaggttatttccaacgcattacaatgaaaatatttcttgtacttattgatagaataagagttggaaatgaagaaggaaatgaatatgataatgatattgaagaagacgaagataagataactatatcatttgatccacatgatattgaagaaatgggtcttgatccatattcaaatggtgattgtgaatttattaaagaattagttgaagtttggtgggggattgaagtacgtattggaggttattttgatgattgttgtttttgtccgtgaatttatttattgtaattaaagtaagagtatagggaggaatatatacattgtatacaattagtttttactattataaacatgaaagtcattaagaagatgcattggttaatattcattcatcatcatcatcattagttttagtttctttacccattgctttatcccaagtaggtttcatttcatttcgccaatgattaaatctttgtattgcattatctaaattatctagacctggtctaacatcaaggaaaaatgatggtaaaccaaatggatcatcttcacctgaataataatcaataacataacgaacttgtttccaatcatcaccaccattattccttaaaactgtccaatcatgtctatcaaatggtaattcagaaccaaatttttcagggaaaatatatgaaagataattatacatacgagctcttggagatattgtatcaggtctaccagtaaattttaataatcttggttgtttaccagtttcttcagtataaggtttttcccattctttaatctcttcccaagcaccttcatttaaaaaattatgaatattaaccatactttcaactgcatcctcaggaacatcacctttacccttacgtaccattgcattaaacatttgttgtggtgaaggatattcccaaactcctgcatcaggtgaatcacctcttggaattgttgatgatgttctttctgttggtaaatcaatagtttgaccaggttgtttttgaatagataattcaggcatattagttaatggatttaatttatcatcaattgttgttgtatcatctgctttatgcattggacatccaggtggtggtgttaaccctgacatattcataggatgtgggatatcatttttaatattgttatttgttgtagtatttggattaggagttgaagaccagaaaaagcccatcttttggtataataactagagttgtgtataagatttgaagataatataacttagggatggttataataataataaaaataaataattatctaagatcttcaattaaataaaaaattctttaacggaaaaaaaatgtcatgaaaattcactgttacaggattggtggttttcttttattgtggaaaatgaatggtttctgctgcaaccacattggatcatgagtagtgaggaggatattagggcctagacatagaaaggaagttaaggaacttactggtaaaactactgctatgaaaaagcaagctactaaaagtactaaaaaggaagttatgaaacaaattcaacagttggaagatgaaatgaaacaaagacactattaaggaacttgcaggagatggaagtgaagaaacggaagaagtttgaagaaattacacctgaacaattacttgcacaaatgaatatatcagaagaacctaaaaatgttgaaccagtacagtctacttccaaaacaacaaccaaaacgacgtaatagacaaaaggaaagacttgccaagagagaagctgaaattgcacgtattcaagaagaagcaagattagaacaagataaacaaccagatttaagaggaattgagttaagaaatattcaagatttatgtgatttacaaaaagttaaacaacatgatattatacctgatggacattgtttattttcatcaatttctgatcaattaaagataagacataatattgaagttgatgtctatgaattaaggaaaaatgcagctgaatatattaaggaaaatcctgatgattttatcccattcctatttgatgaggaaacaatgacaattaggaatattgatgaatataccgataaattagttaatacagttatgtggggtggagatttagaagattttagcactttcaaaagtttatgattgtccaattacagttatgatgagtggtagagcaccattacgtatgaatgaagatggtgaaaatgttgaattaaaattagtttattatcaacatgcattcggattaggtgaacattataattcattacatgatctttaatcagttttctatctatttacacatatattctataaaaaaaacgtctatttacatttacattaatactactagattcctatatttctatatctatttctttttagcacttgcagctttaaaatgtaatatatcaccatcttcaacaatataagttttaccaactctttgaattttaccctttgaacgtaaaattttttcatcaaatggaggatttaaatctttaacatcatcaaatttaattaattctgcattaataaaagttttctcaaaatctgtatgaattatacctgcagcatttggacaagttgaattttctctaattgtccattgacgagcttcaatttcaccacaagtataaaaacttattagatttagaactttcctcatttcttgaattataattggtaatgcagatgatgattcatatgattcattaataccaatttccttttgttgattatttaatttagtttcataatctgcagagaataaaattattggagaatctggtgaaaattcattaacccaatttttaatatcatttaaaaattcattatcatttcttaaataatcttcttcattaacattaactaatataacacttggctttgttgttaataaattatgaatatttaatgcatcaatatgatcatctttccaatcttttttatttataattttttgaccttccattaataaatcatatgcaattgttaatgattcaagttgattttccatacttgaaatttcatgaattggtttattacctttatgttttaattgaacatttaatttttcaattgaattttcaataaattccatatcttttaaaattaattcatcttgaacaattgttaaatctctaattggatcaacattaccttcaatatgagtaatttctgaatctttaaaagctctaacaatttgaaaaattccatcaactgatctaatatcatttaaaaatgcattacctaaacctttattatcacttgcaccacgtactaaacctgcaatatcgaaaatttttaaaatactatttatctttttctttgattgataaagttcttgtaatttatttaatttataacttggtactaaaactcttgcttcctctggttcaattgttgcaaatggataattaggctggattacctaattcacttttagttattgcttgaaaaaatgttgatttaccaacatttgctagaccaacaataccacttgttaaattatttgacgctctaccaaataattttttaacatttttcctttattcttattagttatagctgcataacaacgtatagaattccaaaacttcattgatattcaaatgaagaatggaaatgaactacagatcgattaacgtaaattgcgtgaaatattttttttactgcggaaaagctaaagagtttctaaataataggaaaggaccattgaatttaatagtttttgaaactatttcaatgtaagtttagtaaaaaaagtagatgttgaagtagatgtagatgtagaagtattatagtttccttctcttaacatcattttgaattggttcgttatcatcaggtgtgttaaatgattgattcatattatttgccataatattgttaattgacttattaactggcatattcatgttcatgttcatattcatgttcatattcatgttcatattcatattcatgtatgcattattcatattaatcattgaatgattattaattggaatatttctttttgaataattattaaccattctattattatttaaattcatattaatacctctatattggaaatcacttacaaattcctttgctcttgaacgtgttaaaactggtaaagttctttgatacttttgtctgacacgtttactaacaaattcttcaggtgattcagttctattataatgtaatgatgaatgataatggggaggatgtgttaaatgtaaatgtgacattgaatgattatgattatgagaatgagaatgagaatgggaatgactatgatacatcattgttgatggtattggtgtataaatttgaggtgttttagtcattgatttattattattttgttgttcatcatttgctgtataatcaactgaattattatgagaatttgaacctgatgaacaagcagatgatggaactgatgatggaactgatgatggaactgatgatggaactgatgatgaacatgtattacaagcagaatttgtaatccaattaaatgaagcagttggagttgttcttggagttggtaaaatatttttaaatgaatgagatcttgaaatttcattatttggtataatatcattgatgtcagaattattatcattatcattattattattattgctgttattatcactattatccttactatcattatcattttcatgatatgaagatctaagacatgaattattcggtaaattatttggagatgacattggagatattgggaaaaatgataaatttccactttcatttaaattagtatttaataaataaccatttgaattataataaagatttggatttaaatctaaaccaacttcttttaattttttcaaatgttctaactcttcctccttttgtctaacaaaacattgagctaaataaattaaattatgaataaccacattattattcaaatgagaaataatttttgaatctaaatattttaatttaattgaactttccattttaacaacttgatttaaaatcaaactctctaattcatcgaatctatgttgacgaatatgttttaatcttaaatttaagagtgcaaaattagttatcattattgaacttgcagcaattgaacttgcagtataatttgaaacaatatctgaattaaataatgctaaatcacataaaaacattgaacctaatcttctctctaaattatttggttcacttgtatttaagaataaatctaagaaaatttcaggagttggataagataaatcccaatttagagtatttaatatattaacttcaattttaaggaaagttgattttgatgattgatcataacctgatcttttaattaaagcatttaatatattaccctttggtttattttcattatattttgaagaaatccataaacaacaaaatccaattaatctacaattattaatttcgattctaacatttgaagtataagtatcaaataaatgaactgccagtgaaaaagttgatgaagtccaattaagtctaaaacaaacatccaataaagaatttaatatagaacttcttaaaattttaacttgattttgaggtaaagaaagtgatttattgttattattattattatttgaagataatttttcttctaattcaaaatctaattgaacaatatgattatgaatatcatttctatattctaatatagttaaatgatgatttctcttttcaaccattttaaccatttcatttttataaagaattggatcagtaatagtcataatgtgagtgtgtctaatggtaattgtatgtttatatttttattatttttatgaataaaagaatgaataaatgcaacaatgagtggggggggggggggggggaatagcaatgaataaatgttttatacgatatgaaaagtcaataaataaagaaaaaaaagcagtgtataaaagattgaatggatatagtatatgaaattgaaattgaaattgaaattgaaattgaaaatgaaaataaaaatgaaaatgaagttaaaaatttgaaataaactaagttgaattgagtgtaagatagcctaatatgtgagaataaagtgaaggaatactaataaagacgaataagaagttaaaataagataggaataaatacaataaatgataatataattgaagataatataatcgaattgaagatgaattgaaatgaaacgaagtaaattgaaactaacttaccttagctattaactcttcccttccttaataaaagaaagagaagaataaaagaaaagaaagaagaataaaagcaagaaaagaaagagaaaggagaaagtaatacaatcaatcatcgaaaatagaggaaactcgtcgcccacttgttaatttttcttaagctttaatattaatctcttttccgaaaagggaaactccctctttagggttttgtatagtatagtatagtatagtattactttatgtacaggtatttatttattctatttagtagtagtagactatatgatagtatagtagagtagtagtattagtagtatagtgtatgatagtatatgatagtatactatagtatactatagtatactatatgacaggtcacatttattgaacaattacatcattaagtctaccaaatggtaaaactttttcaatttttttactatcactgattaacataacaattctatcaatacccatcccccatcctccagttggtggtaatgaccattccatattctctaaatatttataatcaggtattaaactttcttcatcacccatttctttattattttgttgaatttgaaatttaaatttttgcttaaatggattattttcttcttcatatgcattcatatattctataccattaataaacatttcaaatctaagtccaatcccattttcatcacttttacttaatggtgatataatttcaggtatattataaataaatgttggtaaaaatttattatctgatttattagtaattggttcaagatattcttcaattaatttattaatcatattaccaattgtatcattctcattatatgataatccaattttttggaaatatttaattaacatatctttatcttgtaaatgtttaattgttaattcatatccagtttgatttttaatttcatttaaaaattcaattttaccaaatttaccatcattttcatcaattttattcttcaattgtaaacatttatcatgaaatctccccaatttattatcatttaaaattcctaataaaatatatttaaacatttcttcactaatttccattaattcatttaatccaataaatgtttgataaaattcacatgttgtaaattcaggattatgtgtactatcaataccttcatttctaaatgatttaccaatttcataaattttatcaaatcctgatataattaaccttttcaaccataattcaggtgcaactcttaaattaagtttaaataatttatcactatcatctttattattatcatctttaatatgttgtgaataagtttcaaatggtttagcattagctccactattaccattacaaattattggtgtttcaaaactattaaatcctttatcttcaagataatttctaatcaatttaattattttactccttaaaattaaaatttcaacactttccttattaactaaataatcaattactctattcttattaattttacctaaatcattaaattttggtggtattggatgtaatgatggtgatgctaatataattggtttttcaacttttaatgataattcaccaactttagtaattccaaatttaccaatacacataatttgatcaccaggtcttaaaattgaatgaattttaataaattcatccttttcaatattcattactttatgatgaacaattaattgtaattttgttaaatcttgtattatatcaataaacattgaacctttacctgccttacgtatactactaattttacctgaaagtaagtatttcactggattttcatctccttctcttccttcaatatcttttttaccattaaataattgacgatattcttcaactcttaatttcttaacatttgacataccttccctcaatatgttttcacatttaccaattggtggataatataatttagtcttgttcattaaatgataattgcttgaatttgatttttcctgaatgcaaaatcagattcttcagtaattttctccctaatgggagttttattattattaatattattattattaccaacagtagaataccatctaaatctcccacttactgctaacttccctactgatctccccactgatctactcaacatacttgtctttactaccatagaagaagaaccaacgaccgcatcgacgttggaattttccactcattgaaaagttcttcactgatgaagaagaagaagatatcaactatatatatgtaaatggtatttttaaaaacaattgtatagaatatgtatacaatttaaccacatcaccttactctgatgactgtgaactactattagacacaggagcatcgtgtcatgtaattggcaatagaaagttattacaaaatatccgtccatgtaatgcaaaaattagatactcacaaggtgaaataacagttaaagaacagggagatttagttataggtaatgtaactattaaaggtctactatatgtgaaaggaaagagaaatattatcagttttagtagattaatagaaaataaatatatcacttggaaaggatcaggaaatcaaataaaatttcgtttcaagaacaaattgatgctattagctatcagagatccaagaaaagactttttctttttacaaaatgcaaataaaaatagcaaaactcactaagttttgaatatagaagatataaatttaaatgatatcattatgaaagtacatcaagcttctggtcatgttgctgcagatatgacacagttataattattacaatcaagaaatttaaacatcaaattagaaaatataaaagaggtacttaaagactgcaaatgtcgtgaaacaatattaaataaaaaccatggtacgaaaaagatcaacaaaactaaatacagagttggtgaaattattcacatagatacaattggtaaaataggtttaggatatgcggttatagcatcagatagagcaactaaaatgacattctctaaacttatagctcacaaatcagatgtcaccgatgcagcaataactatcttaaaacaaatgcaaaatattttatcactaagaaaactaaatatatgtagcgttagagctgacaacgaatatgatacaaagaaatttaaagcttatgctgatgaaaatggtatcataactgaattcactgcaccatactcatcatatcaaaatggtacagctgaaaataaaaatagacaaatgcaagaattaattagaaaattattacaaacagcgggattacatccaaaatactgggcttatgctctacaacatgcaaattttttgtataataatatccaaataagaaagaatggacactcagcatatgaaaattttacaaataaaactagtaatattgatgcaggttttgaaccacctacttttggatgcaaaatgattgcttataaccataattatgttcaaaaggtcttcaaagaacatcatgcaggtatatttatgggatttagacaaacttttaaaaatgcactaatgttattaccaagtgagaagattgttgttacatcttcattccgtgtatttccagatatatatccaatgcaaaagaaggataatgaaaaactatatgataatatttttgaaacatttcgtccaaatcaaagtgagtttgaagattattatctatcggtaactccaccaggtccacataatccatcaggaggttcaggaggtgttggaagcaaaaatgagtcttctaaaggaaagaaaaaatagagaacctacaattgaaaatgtaccagatgagagtcaactaactaccgcaaataatgatgtaataatgacagatgtaccaaactcttcatcaatgattccagagagtagaagaattgaaatctcacatgaacaagagtttattccagaaaatagaagaattgaggctccacatgagaaagaagcagtgccagaatcaaaaatcatcagtcaacaaaaaactgtatcgtcaaagaatggtaaaagaacaactaccaaatataagaaatcaaaaattaagaaacttactctaaaattaggtaaaaaggaagatagtaatacaacaactgaacagtcaagtaaaccagcagaaattactaataccaaaccatccaatattgaacctcaaatagaatcaagcaaagaattagttaaatttcagccagttgaagaagaatcagataatgaagaattttatgatgcacaagacctagatcacgatcatcagaatcaagtagttagtattccagaagatgattttcttaccaaaatggcagagttatatgaaaattacaaagaaatcaagaagttctacaaaacagacaaagcatatctagaagcaactcatcatagacattattataatccagatgataaaccaatcccatctacaaacgtaatagacaatagatcaaaagaatactgggaacaagaaggtaaactaagagaacaactgggattaccaactaagccaatgaaagttccagatttaggagtaaataaaagaattcttgatccatatataaacattcaagcgagaaaaatggactcagatttgaaaaataaatttgcatctgagggagagaaaagtatggaagatatagttatcattgatgttcacttctaggttttcgttttttctgtcatccgcccattgtttgatgacattgtcttgatatacttccatgactaaacccagaataagtgttgcagaagttggattaaagtatagcaacatttttgcgtaatccatcataacaatatactcagctgaatctctatgtgatttaaactgtttgagcagcttcaaattatcggcggcagagataattgccattttcatattcatctgcatgaagaacttcagacctacaggttgacttttaatgaagtctctcgaataatataaatcgagtgctgtagccatgatactgttaatttgaccataatccataccaatttgcatttatgtgcaaaataataaattttgccatttgtcatcagagatattgagcatagcgtatccatttggtacaattgtaaaaccattctttaaataacggaagagaaaaacctgtgttttttttcttaattggagcattagttttcaaagctccataaattaatttaaggttttcatgagattgtacttcgaatggtaataaagtacattcatatcttccgccagaagttatctcagcttttacttccttctgtttttcaataatcaattgaattggtgataaatccgacatattcattttcgtcagctacgagactgtaaatctttaaaaagtactgagatcggatactctataaaaggattatatagaggtaaattataaataatttattaagtgaaaaacttttcacttttcacttaaactgttagctactgcctattcgctaactctcaatacttcacagtttcgtccaatttttttttcattatgcattacattatgtgtattactttggatgatgtttcttattggataaatactatattattttaacttacttaactaaacaataatgtattcaaatatacgtgcacctatacgtttagtgcataagaatggtattagattaaattctactattgttgaagcatcaactaatactatagtaaataattcaactatagaaaaggagaaaaatgaaattattggaaatgatgaaattcgtttaaattctaatggattaccatttgaaaattcacttgaagaaatttctaatatgaaagaaactgaatttaatgaaattgtttctaaaattgaaaatccaactttaaatagagaagaaattgttaattcaaaattttcaaaattattaacattatatagtaatagagataaattaaagaaaacaatgacaaattcttcatcattattatcaaatttcccaaatttaattccaactgatccattattaccatatagtgaagcagaattagcaattagacaaagacatcattctaaaattatgggtaacttaggttcaaatttgaaaaatatttataaacctcataaattaataacaaattcaccaaatattaatcaaatttcaattgaaaaattattatcatcaggtgctcatttaggtagaagtgttgaattattaaataataattttcaaccttttatttatggtaaatataaaggattacatttaattgatttagataaaacttcaacatatttgaaaaattcttgtaaaataattgaaaaaattgttgaaaatggtggattagttttattccttggattaaaaattggtcaattaagatcaattaaggaagctgcaaataaatgtaatggattttatgtttcaagaaaatggattccaggttcaattacaaattcattagaaaatccaaaaccaagaattgaaattgatatggaagatttaccaactaatagagaattaacaactgatgaagagaataaagttattaaacctgatttaattgttatacttaatccagaaaatgcaacagttgcaattaaggaagcaaatcaagctagaattccaacaattggtataattgattcaaatgttgatccaaatttagttacatatccaattcctgcaaattccaattctacaagggtaacaaatttaattgttggagttttaggtaaaagtggtgaaattggtttacaaaatagattacaaaaagttaaagaatataaaaaatctttaggtatggaaattaatgaaccatttattaaaattgataaaatatctaattaacttgtatataaaaatatttaattaaaatataaaattataaaaatataaaaattataaaaattataaaaattatagagtataaaacttaacttaattattattagcatcaccactactacttctactcatactactactagtactatcatcatcatcatcatcagattcagaatctgatctatcatcctttttaatattatatagaacaactctaattgcaattcttaaaattaagaataaccaatataaattaaccaattgtaaagcaaaaattaaagtgaaaaccattggttgagatatccaacatttatattgttgagttttaaaatctaaaattgaaggaccaattgataaaaattctgttaaaacagaatataaaattttaatattaagataatgtcttgtataaatccaaactgacataaaaaagataaagaatggaacttcaattgatgaattaatataatttaaagttttagagaaaccaaggaaaaaatctgatatatccattgtaatataaattgctaaacccatatgagtaaaattaaacatataagataatgaaattaataaaattgtaacaatatgatggaaaactaattctttaaaatctttacgaggtttctctatttgtaacattaaaataattgcttgttgagaccaaaaacctgcttggaaaaggtaataaaatttaaataaccaatcatgttgagtatgaggataattttcataaaaagattttgtattaaagaaccacatatttgaatttttcattatatataaaccgaaaggaccagttataccataataaaagatagcataagtttgttcagtaaatctactaattttagatttacttttaaaccataatgaattgcaattggttttaaaatcatttgaaccataaattctcttaagaaagtgaaaaatataatcatataaaagacaaagcaaaaatctttccaacctttttcatataatggaggattagtatttggtatttgataagacataaataaaaatctatgtaaaggatttgaatcagtataattatttgataataaataaattaaatttaataataaaattattataattggtttaatccaaatatatctataagttaaaattttcagagaaatgaataatttatttaaaacatctgaatcattaattttagaggaaactttattaatttgtttaaattgttcctttttagttaatttaatatcatgatttgaacgaattgtttgtaaacctggaactgatgaatcacctaaattaattttaccaacagatgaatgtcttctatgtttgactatattctcctgattatcagatgacatttttccatgtaaaaaggagataagaagataaaaaaatgaataaattgaactgcccagaaaagaagaaacggtgtttaatggtgaaaaactctaaacagcacaatttaattttccaataatagaataagcctggctttagtactattattataatattattattacgttattaattaaacgcgtattattattattattattattattattattattcttcctcgcaattttggtgggtttttccagtattgaatttccgccgggaatttggcactggttttggcactgattttgcgcggaagttatgtgctataattactctcaaatttccgagaataatactatattcccgattaacccagggtttctattaataaaactttgtctgttattattgtcattgtgaataaatatcatcttataccatattttattaccctttaatttcattattttcccttattattagcatatattcaatgaattatgtttcactactatcaatgagacaaatatctttcattaagaggaaaatttcacttaaattcttattatttataatattaatttcaattttatcttattttactctcattttaaatattcaatacaataataaggataatataaatattttaaataatgaaaagggtacacaacgtgatgtattgaaaaatttaaattcaaaagatgaatcttctagatctttccatgaaaaaatgttattagaacaaattgataataatataattgatccttcaaagaatatacaaaatgttgttgatgatgatgataatattattatcaataacaatccaataacttcacttttaagtaaaattatacctattatagaatcttgtgaaccttcaattggttatgaattacaaaatgaagattcttcaattaatgataatgatgataacactaattcaaatgtaaaggataaaaaaaaattaagattatttaggaaaaaattaaatagaatttatggtaaaaatggtaaaaatgatattggtattcatgatttaactccaattttatctaaaaatttcctcaatgattgtctttatttacctgatgatatgtttcaagaattgaaaatttctcatgaatattttgttaaacatatagaaaatattgaatataatgatattgataataataacggtataaatcctttatatgataatactaatggtattgtatttattggtggtgggaaattttcttggttaactttattaagtattgaaaatttacgttcaactggttcaattttaccaattgaagttatgataccaacaattgatgattatgaatatgaattatgtgaaaatattttacctgatttaaatgcaaaatgtattttattatatgaatttttacctaaaaatttaaattttaaattaaatggttatcaatataaatctttagctttattaatttcaagtttccaaaatgttttattattagatagtgataatattccaattttaaatcctgatatcttatttaatgataaattatttattgataatggtatgattgtttggcctgatttttggagaagagtaactcatccactttattataaaattgctaatagagaaatttcaaataaaagaattagatatgcaattgataaaaaaactccaaatgattattatacaaataatgacgataatgataatattgatattgataatgatataccattacatgatagagaaggttcaatacctgatgcatcaactgaatcaggtcaattaattattaataaaaaaactcattttaaagctttattattaagtttttattataatgtttatggtccaagacattattatccacttttcactcaaggtggtgcaggtgaaggtgataaagaaacttttattgctgcaactttatattataatttaaaagtttatcaagttaatagaccagttggtgtaattggtcattgggttaatggtgaatataatggtgttggtatgattcaatttaatccaattattgataaattaaatgaagataattacattaaatttttaaatgaaaaaattttaaatgaaggtacaaattataattataattttatggattatttaaattattttagtaattcatttgctgaaccaatgttctttcattgtaatttcccaaaaattgatccaatttctttatttaatgaaaataaattagttgatgaaaataataatcaatggagattatttgaagatcaaccaaatattggatttgattttgaattaagacaatggaatttaattaataaatatttttgtccaattgatgataaaccttttaatttaaattatttgaaaaattcaaatattaatcataaacaactttgtaataatattaaggaacgtttagattatttattatcaactgaaattaaatatgataataattaattaagggaatttttgtacattatacttatttatttatagtctcttttaaaattatatattctttgtaaataaataaaaaataataaaaaaaaaaacaaaaagaaagctatatatcactaaataattgtttccatttcctttgcataaattaaagaatttttaattatttctctatcatcattaatattatcttcaaattttaattcatttttatcaaaataaacaatatttttctcaaatttccatccatattgatcaataaattctttaacttctgaaatttcatttaaaaataataaaattttcaaattttcaattggtaattgtttataaactaattcaatattatttgaaatattaattctaattgaatttaataatccaggttcaaatatattaaattctttacatgggaaattattctttttggataaaatttcattaactttattaaaatctccatcaattatccatttctcaaattttattggtattgataaaaattcatccttctctaaatcatcaacatttaaattaaaattttggaaattttctaattcaatatgaaacattgctaaatcaccctttgttaataaatataataaatttaaacttaataatttattcttttgattacttcttgaatttaattcatttatttcataaaatggttttaattgaattatataatttgaaaattcatccattttaaataaattaattgaaattaatgcaccaatttcaagtattgacattgtaatttgtaaatcatttggattaatctttgattggaaatttggtactaataaattatgttcaataagttgaattttaattggtgttaataatttaaaacatgtttcataatcctctttttgaaaatgttctgtaagtttggtagttaattgttcaagtgacattgttgatggaagttgattataaagaatgataatgtatttgccttcatagaataaaacctctaatcaatattcatgtaagttcgttcaggtgcgaacatgatttcaaaaaatatacacgcattttcttagtattaagtattattattaaattaattatctaatggaagaatctattatttatttttatataaaagaattaatgaatggttaagaatttaagaaagaaagaaggaaagggaaagggaataaaaaagacatgtaataaagaagtaaagaatataaattattaatcattgattattaatttttaacaccaaactgcttttcagtagctgaaacaattggttcaatacattcagcatttaataaagtgctttgatcacctaaagattttgcttcaccactaacaatttttcttaaaactcttctaacaattttacctgatcttgtctttggtaattcatcaacaattataattgtctttggagctgcaaatggtccaattgttgctctaatacttaatcttaaatcttgtcttaattttaataatgatgaatcatcactaataattgaattatcctttaattgaacaaatgcaataactgcttgacctgtaatatcatcattaataccaacaactgctgcttcactaactcttgaagaatcttctaataaaacactttcaatttcagcagttgataatctatgacctgaaacattaacaacatcatcaactctacctctaatccaataataaccatcatgatctctacctgctccatcacctgtaaaataataacctggataaggttttaaataagtttctaaatatcttttatgatttttataaacagttctagccattgatggccatgttgatttaactgctaaaacaccttcaacatcattaccttctaaaactttaccagttgttggatcaattataactgcatcaataccgaaaaatggtaaagttgcagcaccaggtttagttggaattgcacctgctaatggtgcaattaaatgagaacctgattcagtttgccaataagtatcactaatatgacaacaaccatgaccaattttttcatcataccattgccaaatttcacttgcaattggttcaccaacagaacctaaagttcttaaacttgataaatcatatttagaaatttcatcttcaccagattttttcaacattcttaaagcagttggtgcaacataaaaatgagttgctttattttgttcaataattttccaaaatctaccaaaatttggataagcaggtgtaccttcaaatataattgttgaaacacctaaagttaaaggaccatataaagcataagaatgaccagtaatccaaccaacatcaccagcagtaaataaaacatcatctgattgtaaatcgaaaacatatctagttgtcattgcagcacctaaaagataaccaccagttgaatgaacaacaccttttggagcaccagttgaaccagaagtatataacatgaagagaggatcttcagaattaacaggtacaggaggtaaataagatctaaattcacaagctaaatcttgccaataataatctctattttctttcattaaaagatttggattaccagttcttttataaactaaaactttttcaattgttggacattcctttaaagcttcatcaacaattgttttattattaattgttttaccacctcttttaccttcatcagttgtaattaaaactttacattcagcatcattaactctttccttaattgaaccagcagagaaacctgcaaagataactgaatgaactgcacctaatctagcacaagctaacattgcaataattgcttcaggagtcattggtaaataaatagcaacattatcaccttttttaaccccccaagattttaaaataccagcagtttgagaaacatctcttaataattcaccaaaagaaatttttctattttcattttcatcatcagcttcgaaaacaattgcaattttatcaggattttcaaaagcatgtctatcaacacaattataacaagcatttaattcaccacctaaaaaccaagaagcatcaccattttcaagtgaaccagatttaactttagtaaaatctttatcccaagataagaatttttgagccattggaccaaagaaagattcaggattttcaattgattgtttatacatttgatcatattcttctttagaagataaagatttagttggttgcttttcaaagaaaggttttggagttggtcttgcaattataccatttgcttcatgaacgacactatgagttggagaagtcatgatgattaatgattgatgattgatccaataagaaagagggtgaacagataactaattaatcaattataatcaattgatcaaatgaagatatcaaaagatcaaaataaagaaatacagctgagcactaagataaatttaagataatccttatactaatcatgatctcaagagtgaaaaatatcctttcttccactttgtttcccttccaccactgtgagaaaataattattattataataatttgataattttatttcggcgtaatgcgttcctgcgccacttcattattatagtattttatactattctcattactattctcatagtaaataattataccgcgtttttatctcccatatatgtctatgtggcgcagtcccgattgatcccatttaggaaggtcttacaggtcgtatagattgttagtatacgatcagaccaacaattttgatcaaattggaatgttattattatacaatatagaagtaatgattactagtaagaaggaatagcagaagattaaatagtgctaaatattaatgacaatgttagtacctttatgtaattgtgtaatagtagtaacagtcatgggggagattttgtgagtctatagtgaaaatgttggaccattgataataataataatgataatatttggaaggctcaacaatttattattattatctaacttaattaccattacgtaatcaagagaaaaaataaaaagacgcgacgatcattacgtaaccaaatagacgcgactactgtattattatattacgtaatcagagatattataagaaaattaaactaagccaaataataaatatcaacacttatagtgggatctactcatctcacgtaaattttagtaaattttagttaaatttattaattttaagagagggcaatccctttttattaaataatatatcctctttaatatagattcaattgtattatattatatctattcactaacaattgtatcaattgtaatatatagcatagtatataatatataatatattataatgtcattaaattctaatccaattaatgattatgattatgatcatgattataattatgatcatgatcaaaataaaaattctcaattaaatataccaaaattaaggcaatcaacttcaaatgctgctcctgcaactcctagaatgttaagaaatacaagtaataataatcctaatcattattcatctaataataataataataataataataataatcataatacaatcccaaattctttaagtgatgaatatacaattaatccagattatttacctcctcaaagaaccccttcgaaaagattacccaattctcataatagagattcttcaattaataataataataataataataataataataatggtttattacctggtgtagactttaaccctaatactcctcaaaaaagttcaagaagatcatcatttaataataataataattcaaatgctcataatcgaataaattcctttaatatacctccacaatcaaatcaacaacattcacaacaacatcaccctcaacaacctccaccacaacaagcacaacccccacaacaacaacaatttcatagaaaggcaattggtgattgggaatttactaaaactattggtgcaggttcaatgggtaaagttaaattagcaaatcatagaataactaatgaaatttgtgcaattaaagttgttacaagagctgctaaagtttggcaaagacaacatattaatgatcctccaactaatgatcctcatcttttaagtcaaagaaagaaagaatatgaaaaagaaattgctagagataaaagaactattagagaagctgctttaggtaaaattctctatcatccttatatttgtagattatatgaaatatattcaatgtcaaatcattattatatgttatttgaatatgtttctggtggtcaaatgttagattatatcgttgctcatggttcattaaaagaatctcaagctagaaaattttgtcgtggaattggttcagctttagaatattgtcattcaaataatattgttcatagagatttaaaaattgaaaatataatgattaataattctggtgaaattaaaataattgattttggtttatcaaatttatatactcatgaccatttattgaaaacttattgtggttcattatattttgcagctcctgaattattatctgctcatccttatagaggtccagaagttgatatttggtctttcggtgttgtattattcgttttagtttgtggtagagtaccatttgatgataaaagtgttaataatttacatgaaaaaattaaaaagggtaatgttgaatatcctgatcatttatctgctgattgtatcgatttaatgaaaaaaatgttagttgttgatacaactaagagagctccaattcatgaaattttatctcatagatggatgaataaaggttattcaaatattgtttcaagttttataccaaagagagttccattaaatttcccattagattcaaatattataaatgaaattgttaatttaaatttaggtatttcaaatgaacaagttttcaatgatttaaatgatataattaattcagattattatattcaatgttctgaaaattggagattgaaaaattcaggtttaaaatatgatccaactttattagatccaactaaaggttatcatccattaatttcaatttattatttagtttttgaaatgattcaaagaaagaaaaataaactagaaaatttaaatcaatcagatatttcatctttatcatcttcaaataataatgtaaatcaatttaaaactccgcaaattgaacaagaaccaatatttaatgcagcttctaattctcataatatggctcatgaacctcgaaatagaattgtaactcaaccaatacctcatgaatatcaacataataataaaaataatattcctcaaaatgataattataatacagtcgatactaataataagagtcaaagattaaaattagatgttaatgttccaaatccttcgtacactttaccatatccccaaccagctcatacatcaccacatactgatatttcaccacattcatttaataaaaatgattcattaaaattatctcaacaacaaactccacctccacaacaattaaataaatcatctaatgttgaagaaggtggagttaattcattattgagaaaattaagtactaaaaagccaactgatagaatgattcataattatgcaggttcaacttcaccaattagtaataatgctcaaattaataatactgataatattaaaagaattggtagtgttaaagttacatcaaaggaaaaacaacaaattttaccatcatcaattcaaaatactgcacgtaaaaatatggctcaacatcaacgtgcagcttcagcatataccgcatctgcatttgttcaagataatcaaattcaaatcaataatcaacaacaacagcaacaacagtcattgcattcccaacaacaacaacaacaattacaatataatgagccatcttctaatagtgattcttcaagtgtacgtaaatttcatccatctgctagagcaaaatcggttggtcatgttagaaaatattcacttaataatcttaaatcaaatacttataaaatggattcaaatgctccaccattaccagaatattcaagttctatgatgaaaacatcaacatctaatgattatggagcattctttgatgaagaaatggataatatcacatttaatgatgaaagtaataaaccaaaggttaaattaactgataaacaaattattgcacaatttgagaaggcaccaccaaattctatgccatcaattgaatatccaaaaactttatttttaaaaggatttttctctgttcaaacaacatctactaaaccattaccaattattagatatgatattattactgtcttaccacaacttggagttcaatttgttgaagttaaggggggttttatttgtgttcattatccatcaattgttgatacaccaagaatacaagtaagtcactcatcatctaatcataatagtggtaatactaataacaatgtattaatgagtccaattaagaccccaacaaaggtaaattcaggtaaatttaatgataatgaagatcaatatattgataccattgaaggattgaaaactcctaatattagtgaaacatcatcacaaatatcaaaatctaaaaattcatcaggaactgatagatcaagagaggatgatttgaataatgaatcatatgataaaaatagtgttaaaacttcaaatactaataataccaataataccaataataccaataatagtgctttaccatcaactccaattaagggacacagaagaaaattttcattaggaaatggaattttaggatcaaagaagggagaaaaattaaccttatcaacaagtatgagtggtaaatataataatgaaattaatatacctacaacaccagcagctgctaatttacgtaatttaagtattgatgatagttcagaatctatcgcattagatgaaacaaatggtgcaagtgatatgttagtttcaagtaggttggaacaacaaaattataatatttcatcatcaatgagtaattatgataaggaatatagcaagggtaaggaaaaggagagaagtagtaaaactccacttaaatttgaaattcatattgttaaagttccattagttggattatatggtatacaatttaagaaagttagtggtaatacatggttatacaaatctttagcaagtgaaattcttaacagattgaatttataatcttttctaatttatttaacgaattaattaatataatataatataatataatataatataatataatgcatatctaataatatacgaatgaaatgatatcaaactataatgtaaaaagtaagatgatttggaataggtttgcatatcgcgtgaatttgacatgaatttacatgtgatgatttgatgttcgaattacatattttcatttaccaaggataatgacaataattaaggacgttagaaggatattatcaatatcagtacgaagtattgcagcagttcatttatttacatcatcatgttttgaattatcacaaactgagggagcaagtatgttaccaacaattcaaacaagtggagatttttgtataattgataaaagttttaaaaatggaaataaaattaaaattggtgatttaattgttgcacgtaaacctacacaacctgatagttgggtttgtaaaagaattacaggtatgccaggtgatattatattacttgatccaagtcgtgataatataaatgaattacataaacgatataatgaaaataaaaatgatataaataatgatataaatgaaattgatataccaaatttaaataaaattggtaaatttaatagagatccatatgatatgtatataattgtacctgatggacatgtttgggtaactggtgataatttaagtgattcagttgatagtcgaacgtatagtgttttaccaatgggattaattggtggtaaaataattattggtatttatgcaccaaatttacttaaatttaatggtaattattatagatttttaaataatacatttgaagattatatataaatttaaatagatgattatttaacgtaatttagataatcttaatttatacatatctcttaaagttttggaacctaaataaattgaacaaataccagtaattgaaaatctgtaaagtgattggaaaattgatgcagagaagaaataatcaatgaaataatattcaaatatgaatatactgataatgaaaaggaatgatagtggtgaatattttgtaaaattatatgcatttgctgcatcaaaatagttccatgataataataatacaacatttaatattaatatgatgaatgtaaattgagttgtaactaatgttggtaacattcttggcttttccttaaatgtgaaataaacttcatctctttcattaaatctaattggttttgcaatttgacttttatcagcaattaattttgatgatggtttaatagtaccaacattgataatatcattataatcattatttaattcatcacctgtaataattgtaatttgaattgaagaatttgatgattgtaataaatatggtgaaatatcctttatgaaaatgttactttcataaactttaccttgtaataattgaggataaagataaaattcagatgataattcaggtattgataatgcaataactacatgatcaggattaataaaactttcattatttgatttactttcaattaatgtaaaaccaaatgaaattttcgtatctgttaaatttaatggaatattttgttgataaagaccaaaattttgatcatcaattctaactagccctttaccaactgcaattgcctgacagaaggtaataaaagtgaacaatagagtgattaaactgtacatattctccggtggttataatgaatgaatcaacattaaggtaaacgtgtataaaacttctgccaacatgaatttcctcactatttaaaatttcatttcattatgtattcattacttatagaatttatataaaatttaagaactattttactttattttactttattttacttacttaaacgtttgttttcaagtactaaacgttcaatttctttcttcatactatcattaagttcttgaactctcttattcttttccatggtttgtttgataacatcatattgacttaatgcttgttcaacttgggcattaattgatctctttgttgcctttaatgtctcgttttcatcctttaccttatcaattaatccagtaactgatatcttctcctcatttaattgtttataattgtttaataattcattatatcctttattatgttcctctaaaactttttctaattcttgattcttattagataatttctctaattcattactagttaatttagattcaattgattcatttaaaattgtaaattcacgatgataattaagtatactattattttgtgatgatatatcaattgtatcttgtttattcaatttatcacatccaaaaatgtttaattcatgacgtaaatgaattataacatcaattaatgaataaataccataaactattaaattatgtaatactttagttaatccatatggatgatttttctcatttgtatcattaatatataattgatgaactaaatcacaccaaaatttggttgactgtaataattcattagtataacttataggatttgatgattgttttgtaatatttaataaaattgttggatcaattgattctaatgttcttaacaatataaatttaaattcttgttgtgaatcaatatcatctaatggtaaaataaatttattaattattaatgcaagtattaaagtttgtggtaaaacatactttgatccacatctatacataaatgataaaactaatgcatttggttttgtatttgtaatattagttttcaataataaagtgtaaattttcataaaatcatttttcaattttaatttttgttcatttgttgatcttaataaaaatgaaagttcaataatcaattgatcgatttccttttcaatttcatatggaacatttggtgtaaaattgaaagtattttcttcaattttcaatgatttaagtaataatgaatataatattggtaaattagttgactcataatcacctgctctaatttgactcaaagtttcaataattgaatcagaggaatgtattttatccaaatattcaccacctgatatagttaaatcttgatttgataaaatttcaataatttcatcaacatgagatttacgtgattgaatgtaaaatttttgaattttatctatcaatgacggttcataatcattataatgatcatcataatcattttcaaaatgtttaaatgacgatttcctacttcttttactattcattgaagtgggagagaaatttgcacccgtaactctgtccaatccataagtagttagtacttgaggttgaaattctgaactatttttcctatctggagtctttggaggtcttgttggtaatttaggtgaaacaggagatgaaggtaatgacatattaacattaaaatcaactatatctctattctcgttatcttctccttctccttctccttcttcttcttcttcatgatcattagtaactacgggtataataagagatgtagctctagatgcacgtagatgagtattataacctcttgatggaactcttggaggcactggaggagcaggtacttgacgatttcttatcttttccgccaacaatggttgctcattagtattgttaatatcatctgtggtattagaagtggtattagaatgagttgaactgttggtatttggagattgtaattgatcaatgtcatcactaccctcagagtggcttctggtaatggatataggtaccaatggagacggcatgggcagtatataaaaggaaagtagaataaataccccaacaaaggcattgataaatctattagaagagcaggttaataataagaaagttgaaaatcactgttttttttctgtgcaaaaaaaaattttatttcaatttcaatttcaatttcaatttccatctttaaactgtgtttctatactggatactctctattaagtacagcaaatcatgtcaaatatagttggaatagaacacgatagagtcaccaatactacatctaccgatttcccagggttttcagcagattctgcaaatactgaatggagtctggattattttaaagaaaattttaaattagatattaaatatattactgaaagaactgcaaattttgatttaataggtcttgatacatctattgcaaatgcatttcgtagaattatgattgcagaagttccatcagttgcagctgaatatgtttatattttcaataatacatcagttattcaagatgaagtacttgcacatagaattggtttagttccattaaaagttgatcctgatcaattaacttggataaataaagaagcggatgaaaaggataaatttactgatgataatacaattgttttatcattagatattgtatgttctaaaaatccaaatgcttcaccaaattcaacaaatcctgataatttatatagaaatcataaagtttatgcaaaaaatcttaaatttgaaccacaaggtcgtcaagttgaattatttgcaaataatccagttgtaccatgtgatccaaatattttattagcaaaattaagaccaggtcaagaaatttcacttagagttcattgtattttaggtataggtgcagatcatgcaaaattttcaccagtttcaactgcttcatatagattattaccagttattgatattttaaaaccaattgttggtaaagatgcactggaatttcaacaatgtttcccaaatggagttattgatataaatgaaaagggtgaagcttatgttaaagattcaagaaaggatacagtttcaagagaagtacttagacatgaaaaatttaatggcaaagtaaaattaggtagacgtagagatcattttatctttaatgttgaaagtactggtgcaatgccacctgaagaaatcttctttaaatctgtcagaattttaaagaataaagctgattatttaagaaattgtccaattgcaaacttaaattaaatttagatttttatagaaatcaccaatatataaatatagttaataataaaataaaataaacaatttaatctctaaatatttcatgaattgcttcatgaactttaatattataaatcaatgtattcccctgatatccatcatattgaggattttcattataatctgcattaatatcacccactaatgtatcatcttgatgaattctatcaattaaaccaaatccaactccataatttaataatatttcaattaattgtaatgaaattattataaaatcaattattaataaacttattaatttacttaatttactcctaaatttaatttcaccaattaaacttaaaaccattgaacctgttgaataagcatctttaacattccaaatatgttgaaaatttaaattatcattccttagattttcatttaatgaaccatttaatccataacttataccatcataaattttatctaaacaaaaaattatttgaaataaaataattaaacaccaaacaattgaaaatatcgttagtattttccttagaacaacttttttatcatttattgaccaattactgaataatgaattatcatttacttcattactatcaggggaattttcattattattattattattatcaccagtttcatttctatttgcattaaaatttgccgtaccactacgtaaatttaaaattgcactagttggtgtatatagttgacttaatgataaatttgcttgactaccaataccatttgaattattattattcatattattcaaattctctgcaaatggttcagttacgaaaacatggaaaatatatttaatcaaaagacaaactaatgattcatcaaataagaatgaaatataatacaacacatgtaaaataattttcatatcattattcattgatcttgataataatttaactgtctgtggatatagtaatctatcattgttgattagcctagcttgcatagcctgatcctgtactatcatgtttggttgccaattataaagaaggacatgtaaatagataatatctcttatatactactcgcttattattattacttttattattattattattattattattatttatttgtacaagtgttttaaacaatgttactataatatacaaaacatataatgtttataatgccttttataatgttaatttttctaagagattggctttcgttcaattgatttaattaaatcaccacctaatattgcacaagattttaaaatatcttcaatatctaatgtaacttgatcttttttatcatttgagtcattaccattaattaatttcattggatatcccataccaactttaaattttcttgattcattacctggtacaattaaacctgtaataactctttcatcaactaatccaccagttttacgtacactccaaacaattacttcaccaaatcttgaaattaattctctataaagatttaatattggatcatcaacagtttcaccatcattttcataattattaatttgttcaattaaattcttaaatttgatattatttggataaatacctgatgaacgacgtaattttttacttgaaatttttttcatatcaaatttaattataatatcataatcctttaatgcaggtgtgaaaattaattgtaaaaatttatcattaatttcaatattatcattatttgttaataaatttaatgcaactcttgataatgatgttaatcttgatgcaataactaatgaaatgccttgagtccaaattttacctgaaatatcatcctttgtaccaataaaatatggtactttaacaccttgtggatcattctctcttaatttattaaaagatttattaatattttgataagtttctaaatctaatttatcagttattttattaatataactatcattatttattatattattatcattctctaaatcattgttaccattattaaaatcttttgataaatctaaaattaatggatcttcaatccaattccaatttgataaaaatttcaaaactcttaaaaatcctgtcattacagaacctggaattccatatggtgcattatcaataaaacattgtaaaacaatcaattcaattacttcctcaggtaaatgatttaaaatcatttgactatctaaccataatttaaataatctaacagttgcagaataatatggataatgagtaactaaaattgatatactacgatgatgtttaactgaattaatatatttttgcataaatcttaaataagaattttcaattgattgaatttgtgtttgactatttggtaattttgaacaattttcaattgattttaaatataaaaattcatcattttctgttaaaattctaaatgaaaatccataaccatcatttgttaaaatttttaaaattaaaatattggaattgtatggaattgaatttttatctttaataataaatgcatctttaatatttgatgagtttttcaaaatttcattacaaatttttaaaaggaatgcatttttagtattttctaatgaaataaattcatcaggccaacgatttgatgattctaattgaattatacattcattgaaaaaatcaggattaccagttgcaaatggtacaggtaaaattattgaagtatttcttaatgatgaagaaattggtaaaattgatttaatttttaatggtaaatttaaattaaataaatcttttgaaattttatcaaatgataattttaattgaatgaaatgatttggcaaaattaatggttgagaatttgatgaatgtggaattaaaggttttggtaataatgaagtaaacttagatgaattaataattaaatcatttgataataaatgtaaattatttgatgaagataaatgtctatctaaaataaatttaataattgttaaaacaactgaatcagttggtgaaatatcccataaacaactccattgaactgtattatctttatatttccttatttgagctttttcttcaccccaaaatgagacaaatttttcacctaattctttatttgtatgtaatggtcctttagttatacgtttatcagattcatttggattaataaataaaccaattaaaagataattatctttatttgaatcatttgaagattttcttttattaattgaccaaggttgagtatttttcaataaatgaatatcaatttgataaattctatcatctaaagcttcaattaataatttataaattttattacaaagataattttctattgtaacaaatgaaattttttctaatgaaccaaatttatcctcatttaattcaattaatttatttaaaggtattgaaataattgaatcatattttaaatttaaattattattattaattaagaaaatttgattaaatctatccttaacagtatcatttaataaatctaaagtttcaattgcaaattttttcaaaattgaataagaagattttgtcattttccataataaattaattttagtatttttatcaaataaagttggtacattaaaacctttctttttataatttgaatcagattcatcaaataatgaattaaatgataaataaccatcatcacataaatcttgagttgctaaataacgaattgtacctttaaataattgataacttgaataaccatgtaataaaattttattattatttaaaccaccaccttgtaaaagagccgacattaaaatattaaattcaaaatgaccaaaaccaccattatttatatttgaattaaaaccacgttgtgataaccataatttacctaaagcagcggcatctttaaaactttcagttgattttttagttgtatataaatattttaaataatatgaataagttgttgaacttaaaattgatgcattatagagaggagttggaggtaaatcatcgattgaatttattaaagaattttgaattctaattgaatttctatcaggtaataattttttactttcaaatataccgaatggtaaacctattaaaattctaattttaaaatttgttttattgaaaattaaattatttttatcatttttatcattaatactttcaattaaaagtgaaggacataatttattaccattatgataatcataagataatttaattggtaaattattttcaggggctaaaattgataaataatgagtaagataagctaaatagaaagcttttttgtaaaaaattctataatttaaataatctttttgttgaattaaagattttggcattgaaatacaaatatcaattgacataccatttttagaattaattgcagttttcaaaccgaatgaaccaactagtgaaacatcatcaggtataatatattgtaaattataatttaaattatttggttttggatcagggaatgggattttaatatttttatcagagaagaaattttgagcttctataagtgaaagtggatttgaatttggaattttaccaattaaattatttaatttatgtaaaactttttcaattaatatacaatgagattgttttaattttaattcattaattaattcatcaatttgaagtttaaaaatatttgatttaaataattcagcagtttcttttgcgatttgaatatcttgagatgaaatttttgcctttttagaggaaggtttagtattttttatactactactactactattattattattattattattattattattatctattgaaatgtcatcattaataacctcatcattagatcttttagacattatttttgaactatgaaatgtatactgtatatatgatgagtggatgtgggggtagttatttagatgcagataaaaatatataaataaatgtaccaaaattgaaggctccttccttcctttcttgaatttaagatcttgttgccaccaaaaaatatgaaaaaaccaaaaagggaatgaaaaaaaaattttatttatttaatgcgtgtatttagttatttcattttattaatagtaatggggttttcattttattcattttatgatgtattatgacaatattttttgttgttaggatgtctgggtcgatgggactgtggatacttattacgtaatattgaatacttacgtaatataccgaaatgaaaaccgaataccgataccggaatataatttattaatatgtaacgcggatataaggtaatataatttgagattacgtaatatatgggaataagaataagaatgatcatcgatgattagtatagtagaggggtatatggttatattatattctgtattagtatagtatagtatagtataattgaaacaatgttatactataatatactatactatactagtaatatactgtactatataagatacaattatgtaaactgtaactggaataatagccatgcacaatatgcaatttcttcatacaataatctgtcaaaatataaaatttgagaccctcttttttcataataagtgagaataacattagtagtagtagtatactgtttaaaatagaatattttttttttttttttgattttcaatttttgagttttgttaacaaatttcatttagttaatattcatttcagtttgccacccttgattaaaattcttttccttttggacaacacactctttattattattattatcatataattatataatcatattataatatacttggtgtgcatgaattaatcacatcttataataaactattctattactacccccttttttcaattattcaattattcaattatttcattattctgtcaaatatcaatattaatattaatatattataaatcagtataatcatttaaatacatttattccttgctacatatatcaataaataaactaaactaaactaaacttacttaatactctctttactataattaaaaaaaaaatttcaatcataatgttaaatttatcaaaatcatcttgttctttgattataaaatcaatttcaatttctaaaaattcagttagaaatattcattatattaataataatattaatagatctaattcattatttagaccttttattatctcaaataaaaattcatttattcgttataattcaactaattctgataataataataaatcatctgataataaaattaaatctaaaaatcctgctgaagttgcatctccaaatgctaatttaccaattccaacttcatctaaaaaattaactgtttgggaaaaagttaaacatgaagctcatcattattgggaaggtactaaattattaggtctggaaattaaaatttcaactagacttattacttaaaatgagttctggttatgaattaactagaagagaatatagacaattaaagagaactaccgctgatgttttaagacttttcccatttgcaatgtttgtcttaattcctttcgctgaattattattaccagttgcaattaaaattttcccaaatttattaccttcaacttatgaatcaaaagttgataaagataaaaaaatggcattattaagaaatacaagatataaagttgctcaagttttaactgattcaaaacaaatggttaatttaacttcaaatttaactgatgaacaaattgttgattttaaagattttatgaataaatttaataattcaaaatctaatgaaattactcgtcaacaattattaagagttgctaaaatgtttaaagatgatttaattttagataatgttcctcgtggtactttagttgcaattgctaaatatattaatttaagaccttatggttctgatcaaattttaagatatagaatacgtcataaaatgctgaaaattaaagaagatgatagattaattgatgatgaaggtgttgaaaatttatcattagttgaattacaacaagcttgtgcttctcgtggtattcatatgtataatacaactccaggtcaaatgcgtcaatacctttatgaatggttagatatgcgtttacgtgaaaaaattccttcaactttaatgttattagttaatgcttatacttatggtgaagctgaaagatattcttcaactcatgaagctttgaaagctgttttaagttcattaccaagagaattttatcatgaacaagaattacaagttgatattgataatgcaacaattcaacaaagattaaatgttttaaaagaacaagaacatttaattcaaagtgaaaatgttcaagaaaaagatcataaaattttagttaaggataaattaagtttagatgaagatgataaatcttcagataatgctaaaaattctgaaaagaaataattttctcattaattaattaactaattaactattattttattatattccattctatcatatttattattattatttattacaaatattattacaatctctgatattgaaaagagttgttaactataatttacaaaaacaaaacatgaaaataaccattaatgaaaactatttttttacatattagttattctttactatttatataatcttttacatttattattattattttttttctaattacttatttttatttctaattacttatttttatttcttatgggggttaactcttttttttatctgattttctataaacattaatattatacaaaaagaaatgattattaaaataaacgttatggtgaatctgtaattgattcaataacatctctagaaatagctaaatccgttttcattatcatattccatttctgttaaatgtgctaattttaattgattcttcaatctttgtgattttgataatttaacgttaggtttcttaatctcaattacattcttatcatcaatgaaacgtgatgtattgttaaaactattattatcatcattttggaaattcttaacagttgctctattaacagcataatgtttccttctttcattcataaatttcttatcaggtttataaatccatttactcttaggtttaaatttcctctcttttatctcttcttcttctaaacaagctaattgataatcccaaattgttgcataatgttgaaatattaactcattacttggattcttattaccttgacgtaatttatttaatttcataagtctccaattactaccatcatcaccaaatttaaatggtatttcatattctattcttggtttatcattactaataatttctcttgtttctttaattattggttgtcttgtatcgtaattaatcattttacgtcgtttattcttgaaatcatctttattatagttgatatctgttttacttaatcctaaatctatcgtaccatcagattgtcgtattctatcaagtctaggtgtagtggtattgatttcactttttatttcttctcctccttcttcgtcttcttcatttgatgtattaaaatctgatgtttcttcaataacatgatttgggaaaatttttgaaaactaatggagttgtaggtttgggtatattgggatagtttatgactagtggtgtcgtattgaattcattgtgtgtatacttgtaagagaagagtctaaatacaagtatacaatcaacatgaaaatttaggtgtagtataattcttactaatttttttcaaaatcttttgaatttattaaatcattcaaatgtgtatatttatcattataaaatgtgaaatactatatatatcatacctatatactatctacaaggaaaatataatacatattttgtttatttgtggtaaaaaaaaacaactaagtaaaagatcttgaaccacctctaacaaattctataactttccaaccttcagtatcaacattatccatttcttcaggaactctagttataaccattgcataacttgataataaaatatcttcatcactacctgcaactaattcaccagttttaaattttctgaataaattaatttcttgaactctagaaccaataaccattacaggtatattatttggttctaacattttaaaactgacaatatcaacacctctaatatcctaaaattttaccatcagagaaaacaccttgatctcttaattgtttttgctttgctgcataaatattatatggtgcttcactaaaccatttttttaaaatttcttcatcacctttgatatatgcttcaacaacttcaggtacaatatattctcttaattgtttttggaaagcaattgatgtaaatttgggtcatattctttaaattgtttaacaacttttgcagcttcagtttcagagaataatccaccaaccttattaataatggttcttattaaaactaataatggattttctgcttcttcccatttctcccttaaaattaataaaagtttaccaattgttgaatctggtttaatctttaaattttctttaaaatttgaagttggtttaatatcagttgcaactaatgcattaccaggcttcttcattctttttaactaattttggctttttagctaattctctttctcttctcttcattctttcctctttagattcatacaaaccataagatgaagaattttcattgaaaacttcagatacatctttataagcttttgtctttgtaacaggttcaacaactttatcaactacatcagcagttgttgcagcagtttttttaacaacttgaccaacaggtgattcccaagctttataagcaacatcaccaacaactttagcagttttgtttattgtttcaccaaccttacctgaacctttttgagcaacatcaaatgcagttttagcccttttaaaagcttctgaatcacctaattcatcagttgcactctttaattgtttaatttgatcagttaattcagtatttttcttccattcttttctaaacgtttcagtaaatacttgtaatggagattttggtgcaaatttaattgaatttgttgaaaataatctactcttacttgaagttacaagtaatgtagaattttttaatgttgtgtatctatacattataataatatgagatatatgaatatgataacactatttacaagaatgaggatgtgttgtttctttaaataatgttaaagtatttataaactgataatcaactccatacaaatacttccatttcaataacccttctccggaatcaaatatttttccaactttcatgacactgaaaaatttataattatctctcaatcgacgcaccgtccactaccatcgacgagtcggtgcgtttttgatattttttaaaatttactactattatcactacatgaatcttattttacaggcaaagaaaggattgatttgatatttaaattcaattttaacttgatttatcttggtttacatcttttcaaatcaatcaaatcacagtctggaaagtcatatcatatacaaaactttatttttatattgaaaaatggcatttcatactaaagaaatgaaatcattgaaacattcacgtggaatgccaataaatacactaagttcaaacagaaataataataatagtagtagttcatcatcaacattttctaaaggtcgacccttttcaatagctcccagttttcaaactaacaaatttgattttgatacttcaaataatagtaataataatactaatagttctgatattgaaaataataccgatgacatattccgtgaaaggaataaaaggagaactttatatgctacaaatagttatactattaaaccaccaagtcaattaataaataatccattaatgaatgaaaaatttaaattgtttaaatatactgtatcttcaaagattgaaaatatatcaaccgaaaaggaagatttaacattaattttaagacatgataaattagaaatttcaagtgaaagtttagaatttagagtgaaaataccttatcataatattcaaactttaaaagctccaaatttgaataataaaaattcaacttatctttttggtttaaagaagagtatgtcacaaactttagatgataaggaacatagaattgtcgaatttgtaatttatttgaatgaaaaatggtcaattaaacaaacaaaacaattagaggatttgattaatttatcacttgatgatcactttgttacagttaaatcatttgatacaaaagatactacaacatattttgaccctagatcgtttgctgcttctgaaccaaattcattttatggtttaaaggataaaagtagaaacaaaaaggttttaagagacattttaacaccagcttcttcttcaatcgatttagataatcctaacagaagggaaagaacacaaagagttaaatcaactattcattatatgaatgaagatgaagatgaagaaaaagcatctgaacaaatggttgttgaaaatggtatttccaccatttcagattatgtacctgatgatcaacaaatttatttcgatccaaaattaaagtataaatttgataataagaaaacttttacaattacaaataatgattttaattgtttgtataatggaaattggattaatgatacattagttgattttttcataatgtatcaattaaaaatttcaaaagataaaaaaattccaaaagttaataatattgaaattatgaattcattctttttcacaagtttatcaagaccaattgaaaatgataattactatcaaaatgttaaatcttggtttaaatcaaataataacttatttgataaagattttattataatacccgttatgcaagatttgcattggtatttggttattataacagatttaaaatatctgaaaagaaaacattcaaagataacatcaaatgataaaaatagtaatgatgatagtaataaagaagataatgaggataatgaaaataatgatagtaatgataacaataaggatattaatagtggtattaatgttcaaaataaagataataatggtgataatgatacacctataatagatcgattacccatagatgatgatctgaatgataatgaggatactattgataacactaatgatgataataatacatcaaataataatgagtcaagtaatacagataagtcttcaaagaaggaaaaagttaacgggattgttcaaatttgtattcttgattcattaagaagaaatcacgagaaagatgctgaatatttaaaaagttttctaattagttatgctgctgaaaaatataaatttaagataaatagacaagaaattaataaacatgtttgtattgttcctcaacaaaaaaatttcaatgattgtggtattcatgtgttatttaatgttcaaacatttttagaggatccaattaaatttaaaaaaaccattttaaaaagaccatatacaaggaaaatatcaattaaaacaagaaaggaaaatttagatattttcaatgctgataaaagattaaatttacgtgaagatacacgtaatttattagttaatttattaaaggaacaagaaattaaaatttcgtggtgatgcatctcatgtatgtactaaaactattaaagaacaaaggatacttgacttaaaatcaagaaaaattgtaagtaatgatcttgaagatactacagagaatgatgggaagagtgataatattgagaataaaagtaagtctattgaaagcgaaatttatccaaacaacaaagaaaatttagaaaatatcaattcttcatccgaaaatcaaaacagagtaataaaagatgatattaatgagagtataactgattctgaaggtgatagtaaagattcaacagatattataaataatagaaatgaagataaaaacaaagatagtaaagagagtcatactgatgatgaagaagatgatgatttaatgattacacatgtttcaacaaaggagcctgccaatcgtgaactcgaattatcaaaagtagaaaaagcagctgcacctctgagtaccttaccaataactaaacgtaataaacgaaatagtgattctgaatatgttcctcaaagtataccaaaattaactaaaaagattgaatcatcaaaatccagtcctaatggtacaatgataaaaagaaaacgtggtagacctccgagatcagatagtggatcaccaatttcaaaaccaagaagaacttataaaagaaatcgtacttttgaaaaagatataaaaaatgatgaaaataaagatagtaaagaaattcaagttgaaaattcagataaaggtgggaataatgaagttttctctcaagattcttataagaatccggatgattcatatgcacctattaaaaatattccaagtgatgatgaaaaagcaactattgttgagaaaattaataaagaattagaatcatccgaatctccaaaacgtgataccattcgtaaaactactacagaaaaagttttggatgcagttgattcagaattattaacacctactcatgattcaccaatatcacctgttaacataaatcactatgatattggaaaaactcaaagaataaaggaagatagaatagaaaaggaagaagaagatagaagagttgatgagaacattgctgttattgcagatgaagtagttcctgagaaatttgatttccgtaaaaaagcttttagaagactaataattcatggagctaataataatatccataatgataatttaactgtctctccaataagatttgagaatttgcctgacgataatttaactgtctctccggtgaaacttgattatatatcccctataaaagcctcgaaaataggactcgatttcgtattaccaagtcaaggcactccaccgcctgaattatctaatggtattatcatggaaactgcaactgttaaacctgaattgaaaaagaaattgagatcatcaacaagactatttgatactaaaaagggtttgcatttacatgattctattcagattgatgatgatgaagtgcaggaagtaaatacggagttcaaaaaagatatgagaaatgatgtttttaacaaagatactaaaaaggacatcaatattttcaacaagggggttaaaagggaaattaaaaatgatatttttagaaaggatgaaagaagggaaattaagaatgacacttttaataaaaaagaggttcaaactgaaaaagaaagatacgatgatgatattaaaagtcttcgaagtgaaaagaagaaatctgatttggtttttgaagtaagtagtattgaaaaaaggaagaataataatgattttaaaattaatacaaaggaggagaaaaagaatgatgaatttaaaagttctgaaaaatacttcaaattatctggcaatagtaaacttcagaaagataatgattttaaattaacaatcagtgaacaaattaatattgatataagtccaataaaagttattgatgattttgtcgcagatgataataaaagatttatgagtgatgaaagtgtggccaaatcgtctgatcgtgctcatagaattaaagaattgtcatcaaagatttttcaaaaaagaaattcaaataaaaggacgttagttcctccaaaaaatggaattagttctagagttgaaaaggtgttagagttgaaaaaatctgtcaataaagatcgtagtgatatatctatgaaaacagtagaaactagaaaagttaatcttattgctgaaaaatctaaaaatgagaaactcatggataaaaaacttgataaaggtggtatcaaaaaagatgcaactgctgatattgatattctaaaagtggaatctccaaagcttgaagttgaaatcacacaatccaaaatcacagtacctagaaaaactgaacctatgaaagtggaaagtccaaagattaataatcctctgattacaactgattccaaaaaatttgaagcaacaaactcatcatttgaaatcactcccaaaattagatcgagatcttctttcaatctcaaacctgaagttgtcaaaattattgaaactaaacatttggaaactaaatcagaatcatcaaataagcttgaagatataactaagaataacttaccaaaagtaacaccatcagacattgaatttagtatcaattcagaaacggttacttctgatttatcatctagagcttcatctagctctagatttttggatcgtaaaagtgattatatcatcattgacaacaccaaatcagatgaacctaaagttaaccaattaactgaaataaattttgttggatcaggtaaaggtcatgagcatgaagaagaagaaatcaggattatgaaaaccgaatatattcaagataaaaaaccaaaggaagtttttataccaaaaagaagtacatctcccattgaattatttccatatgataaccaccaaaaagaggtatcgtcattgaaaactaaacaagtaacaattgagagagctgagaaacccgttcggagaagatcaacacgattattagaaagatctggacataaagtggaaactgattcattgaatgaaaatgaacttaaacaaattgaaattgatagtatagttgaaaaaacacaaacttccaatctctttaatgatgttagtgaagaattaattggtgtaccggaaccaacaaaaggaaggaaaaaaaggggacatccaagctctgaggttgttgaatttaaaacaaaatataatttaagatcacgtagaagtaacagtattaatgaaataagttctggggatatcaaagaaccacatgttgcagttaaaaatgaaaggaaaagaacaagaagaaggtagttaatttcaaaaaagtattgagttatctttataagatttgtatactatttaattaatagttaatcatcaataatcatagtcgtatattcgtaaagttatatacatattttacaatttaaacattaaaataagcagcaaaagcatttgctgttatactacttcttgcacttacatattctttaatatcattatcaaaagtttttattttaccttttgttgtaattaacggagctttatcaatttcaggtgttgtaaccatcatataaatttgttttgttatttcatcaactgatatattaacatatttataagttttactattactatcaatattaattgaagatactcgactcttagggggtttatcatgaattatggattcttgtgttgtatcatttgttgtatcatttgaattaattgtcattgaatcagaattatcggtggtggaagataatggaggtgatttaatagttgaattttttaatggtttcatccaatctgtattaacatgtgttgatgttttacttgatggatgtatactttgactatgtgaatataaagaattattttcaaattcactatctgataaactttgatcaattgttatattttctttattgagttcagatagttcaattgcttcatctgcacttttaataaattcaattggatccaatgatgttgaaaatatacctgctttatcatagggtttaacgggattatcaattttaaaggatgataaagacatcgatagcctttgatttggtttagatgcctttgtataaactgttgatgtgaaatttacagttgaatccacaacgctacctgcagtactattaacatgtttaacagttctatccttcagtgttttctctcttaaagatctaaaatctttcatcaaggttaattcgtgaagtttactttctccttgagaatatgctgtattgaattcatttattatgtgttcataagttaagaccgttgagtcattaactataccatgaattctactaaattttgataaatttctttgaatatagtttaaaatatctgaattatctgaatataatttgaatgtgattttactcataaattcagagagattgagtaaaatttcggggataattaatttaactttattgttaaaatcttggtaaataagttctgcttctgatagttttttctcagttgcttcaatctttgacatatccttctctgttgcattttgtactttaagtacagattccaattttttagtctgtatatcataatctatctttttatgatctcttttaactaataatttttcaacatttttcaagattttaatcatatcatttgatttttgtgtgaatgaatcacttgatttatttgacaaagtagtgattttatcaagtaataattttgcaagttttgaagcttcctctaattcatgcattgtaatatttgtgaactcttcattgttatcaactaatttatcttgtttattttttttatctaaattacaatgcaaatctctgaaaatatcaatcaccataagaaatttagttaccatacttatccaaaatttagttaatttgatgttttcactttttaaatattctaaacctgcaattgaagttttaatatcagattcccattgtttataaataagatcttcattagatttgtgtccaaacaattgatgtggagttctgtataatgctttccctacaccttttaatgacattgattggatggttgtgaagttagaggaagcagaaagaagaaaatatgtaggctgtaaagttcaaaaaatttattaatcatggtgatgtgcatgattgcgcagtaattccgtttgctccgattgtcttatataagtttttaacttaattgattaaatttatagagaagattacacgttattggtttaaagagttgattacatatatataaatgagagtgtctatatcaattgagatcgtcgtcatcgagcatattttgtagtttgccaaagattcggtcacgatgaatagcaattggatcatcacgatctgtggagaaaaattcgtttcttgtgaaagattctgtgtatgaagagttatcatccattgcttcatcaatagcatcatcaatttgattaccaaattcatcatcatcatctaaatcatcttcattatctccgtactgtttcatcaatttgatttctaatacctctgaaatcttctacatttaaactttgtacaccttctgatcttaaaaaatcagttttactaaatcttcttttatcatttaatattacaaattcatcatcttggatcatcacttggttcatttatacccattgattccatatcacttaaaaaatcaggagaatcatcatcataacctgaatcttcatcttcaggataatcattcctataaaaattttcatcattagaatcttcatcatctgatatcattgtaagatcattatcattttcaaaatcttctaaatcatcatcatcgaactttaatataacctatattttcagtttcccatcttttactaactgccttatctctgtaatagacatcataaacataatcttcgtaatcattatcatcattaaaaattgcattatcattatcattactattactgttcaataatgtggaacgattgaaagcaccatcactaagtgcactttgagaaacacttgattgtcttctctttggtaacttaacactgttattaacgacagtctcatcattatccttcaaataatcattcaacatttccaataattgaggattcaattcaactggtttttcattatcttcaaattgagctttctgtaattctgattgaattttagttgattcatttgactgtcgttgtaaatcaaatggagaaaatttatcaattaatttcccaacttcataattaacatttttaccatttttagaaggtatgttataaactggacgattgttttgaacacctgaaattgttgataaaacagttgtttgatctttaatatcattttgttcagttctttgaagtctaaaaatatattttggtctctttatacgacgacgtgaagtttccataactaatgcctgtaatggatcatcggtacgttttcttttgaacccttagtatctgtggtggttctttattcatagttggttgttgtttatataataatatagtcttataatgatatacacataacagagtcctatcaataatttggaatacaccggatggagggtggtatttaaatagaatgagaaattcactatataaagtgagggaaggtttctaagctcagaggaaatcaaatgacggggagaagaaggcattgctattgctattgttcggagttactatagcacccattgctttgctttgatttgctttgcttttgctttgctgttggctctttttctggcttgtatataagtaatgactggacctatactgtggtcactctatagggctaatagattattcttaaatgcatcaaatcttattgtaggaatgcttttcgatcctgaaaaggatattgtacttgtcactgggggtgcttcaggtttaggatttgaaattgtaaatacattcaagagaaaaggagcaaaagttgtcgtatttgatatagtagttcctgaaataaatagtaaaaattatgtggatggtgtatattattataaatgtgatgtatcaaatgtaaatgaagttagaaattgtgcaaatgaagttttaaataatactggtattgttacaatacttattaataatgcaggtataacgactggtgaaactttattaaatttaagttttgataaaattgaaaagacaatggcagttaatttattatcaagtttttatacaattaaaactttcctacctgatatgttaaatataaagagaggttatattgtaacaattgcttcaactttaggttatatgtcacctgcacgtttaagtgcttatggtgcatcaaaatcaggtttaattgcattacatgaaagtttaacttatgaattaggtagtccaactttaaatacaactggtgttaaaactttattaatttgtcccggtcaacttaaaactcatcttttcgaaggtgttagaactccttcaactttatttgcacctgaaatggatccaaaagatgttgcaagacaagttttaaaagctgtcacttatggttgtagaggtgaaattaaattaccattttatggtaattttttaccaatttttagatcagttccttggccaattgttgcaatgatgagatatatttcaggtattgatacgagtatgaaacaatttaaagaagttgggaaaatttcaagtgcttatgtttctgaaaaagcatcaattatgactaatatatttgcaattaatagtagaaatgatgatttaggagaaaatattattgatgatgttggtggtggtattattgattcatagatatgacatgtatttgttcactttgctagataatttaattaattttttgcttttttttgtctaaaactattattattattattattattattattattattattattataccctctatataaaatgttaaattaaaatgtattcttcttttgctttaaagaaacccttatttctttctctttttattagaagattttttatcatcctttgcacttctctttgcaggtgatgatgaaggttgaactttaaaaaatccatctaatctaccttgagtaccagttttcaaagattttgataattttgatgcaccatctctaattctttgttcactaaatccattttgtttaaccatgaattcaactaaaccttcaatatctggttcctcccatttcaatataacatcatcaccttttaaaacatcaggatttagaaataattctcttgcttctttataaggccaattttcaggtattttatatttagattttggattttcttcaattgatttaattatattttcaatatttttatgttctttaattaattttaatgcagttactggaccaatacctttaattgtttcacaataatcacaacctaataaaatacataaatcaacaaatgtatttatatccatttcaaaatcttctaaaactttatttatatcatattcttcaattttcaattttcttgcctcagcagctgtaacatttcttaagaaatgagccggttgataacagagagtatccatatcttcagatgctgcaccataaactttaccagattttgataattcagcacattgagattcagcttcacaaggtgcattaacaaatggtatacccattaattttaataattttttagcatcttcattttgttcctttgtaactctaacagttcttctttgaaatttttgtaattcttcaattgaaccagtttcctttaattcagttgccttagattcagcttcttctcttcttttcaatcttttctctaattcaccaccttttaaaactggtggtttaccatcgaaaacatagcaaggtttaataccatatgatgccattctaatagttctatagaaaaatcccataagatgagaagttgtatcaccagattcatttgttaaattattaccatcttgttgtctaacagcaattaagaattgataaagacacattgatgcatcaattgcaatttttctaccaaacaatgatttcatttcatttgaaacaattgcacgaggtgcatgttccttcactaaagcgttcaaacctttaatacccattgaatatagttgttacttatacttgaaagacaaaggaataatagtaaaccttcaaacaagtcaataaatctgccaaattcatgcattggtagtagacgcgttgcaatgaaaaaaaaatttggcgttgttccttactattattaatcttaatactatctgagaggtggactttgcgtcggcaggggggtgtatatcgtacgtccctggcagttgttggtatgggaaagatggtcagtgagaggtattgtgtatggtaataataagtaagataagatgcatgatgtaatatgaagtggataaagtaatacccgatgcatataaacagttataacagccatgatatatggtcattgaaagaggctggtagagatataggcttatcaaattaaaaaaaaattagtaatgataaattaccgttcttctcactagtctttttgatcttgaataatttagttctttttcattcttctttcattatacaatgtcgttatctgttattgaacccgttgtcggtgcatcgtctgctttaccattagttgtagagtcaggtattatatttgaagagaaaaaaggaggaggtggaggtcatggatcaagtggtggtggtggaggtggaagatcgggtagtggtggtaatggttatggaagtggttcatatggtcatggtggtactgggtatggaggtgaaggttccggtagtggttctggtagtggttctggtagtggttctggtagtggttctggtagtggttctggtagtggttctggtagtggttctggcagggggtctggcagtggttctggatctaatcgtggtggaagtaataactattataatggaagaggttcatttggtggttatggagcattaccagcaggtcttgtcttaggtggtgcaggttatcttgcatataatcatatttatcacacatatgaatcaagtggtacacttgtctatactgaggtaccgtctggttgtacatcaaattgtgttacagtaactgatttaccatcatcatctgttaatgatactacacttttatcatcaacaactgaatcatctacatctaataccaatacagtatcatcaatatcatctcaatcagccaatgcagccaatgcagccaatgcaataccctcccacagaggtcacagaagagttgtagagttgatttcactcagtttattggctgcttacctaatgtaatttttaactattatttgatatttcgcgctttttaaaaaaaatgtttctttctttctttcttgaataactgaactttgaattggaagtatagtatataggttttcttcttgaaatcttacacacttttatttatcatttcatatcgtttacgacacatcacaatctatcacaactaatgtttggtagaacttctggatttggtgggtttggtaataatgccgcaccttcaaattctgtaaataaccaaaattcttcatttggttcaaataataacaataacgctttcggtgctgcaacaaattcaaatcaatcaaataatttattcggtttcggttcaaataataataatcaatcaaattcagctggtatgttcggtgctaataatacttcatctccatttgctagttccaatactactggtggtggtgcatttggtgctaataacaatcaatcaaataatttatttggtggtgcaaatactaataatagtattaataataataatgcatttggtacaaataattcaaataatattaatggtacaactatcccatttaaagcttatactgaaaaagatccaactattggtacctcttattttgaatcaattactgcaatgcctgaatatagaaattattcattcgaagaattaagagttcaagattatttacaaaatagaagatatggtaatggtaatacaacttcaacaggttttggtaatactactggtaatatgggttttggtgcttcaaattctacaactaataacgcttttggtgccccatcaactactaataatgcttttggtgccccttcaaatactaatgctttcggtactagtaacaatgcttttggtgcccctgcaaataattcaactggtggtggtttatttggtgctaaacctgcaactaacaacttatttggtgcaaataataatcaatcaaataatttatttggtaataataatcaatcaaatactacaggttttggtggtatgaataataatactaataatgctttcggtgcttccaacactacaaatgcgtttggtgcaactaataataacgctttcggtgcttccaatgctacaaatgcgtttggtgcttccaatgctacaaatgcgtttggtgcttccaatacaaataacgcttttggtgcaactaataataacgctaccggtggtggtctatttggtgctaacaacaataataataatactggtggtggtttatttggtgcaaacaataataacactaatactactggtggtggacttttcggtgcaaataataacactaatactgcctctggtggtttgtttggtgctaataataacaataacgctaccggtggtggattatttggtgctaataataacaccaatactaccggtggtgggttatttggtgctaataacaataacacaaatacaggtggtggactttttggcgcaaacaataacaccaatactaccggtggtggattatttggtgctaataacaacaacaacaacgcaactggtggtgggttatttggtgcaaacaacaataccactaacaacactggaggtggtctctttggtgcaaataataataacaatgcaacctctgggggcttgtttggtgctaaacctgctgctcctgccggtggtttatttggtaataataataccgctgctcctgcctctagtggtggattatttggtgcaaataataacaataatacaggtggtggtctttttggtgctaaacctgcaactccagttggtggtggtctgtttggtaacaacactgcaactaataatgctccagctactggtggtttatttggtgcaaaacctgcatcttctggtggtctttttggtaacaataatgctaccgctgcacctacctctggtggtttgtttggtaataacaatgctactgctgcacctgcctctggcggcttatttggtgcaaaacctgcttcagctggtggtatgtttggtaataacgctgcaactacaactcctgcaactggtggtttgtttggtgctaaacctgcaggcacaacaggtggtttatttggtaataatacttcaactaccacacctgcaactggtggattatttggtgcaaaaccagcaggtacaactggtggtttgtttggtaataatggtactaattcattatcagcgcctcttggtggtggcagtggtggattattcggtaatcaacaacaaacacaacaaccacaatttggtttaggtcaacaacaacaacaacaacaacaacaacagcaacaacaaatgaactcaaatccttattcatctggtccactgtttaatggattatcaaatattaatgttaatccagttgttcaaccaactgttcaaccaatcgctaaaccaattaaggaagctgaaaagaaaaaagtttcacttgttgcagcttatagaattactccttcaccattatatgattcatctgaatcaattatttctagatcaactagtattgtttcatcaacaactccattaaaatcaccagattctgcaattaataaaattgctgaaaattcttcatcaaattctttatcaagctctgaaactgataaattaattttatcaaatccattatttgctcgttcaagaagagttgcattaactgttaaacaaaataatgaatctaaattattaccaaaagattcccaaagctcttcatctaaaactattgatttgaaaaatgatatgccatctcaaattaatgatacagttcctgataatagagatgataaaccatctgagaaaaaaactgctgaaaataacacaactgttgctaacccaattgatgcattaactactaataatgaagttgaagaagaatcagttccttcaagcctctgcaagtgaaaaagaagaagttaaatctgaagataataaatctgaagaagaaactgagaaagaagctgacttattaccagaaggttactacactgttccatcttttgaagaattatcctcatattctcctgaacaattaattgcagttaaagatttcactattggtagaaaaggttatggttcaattcaattcatccctccaatcgatttaacttctatttctttgtcaaatattgcaaatttagtttcttttgaaaaaaacgaaattaatgtttatccagatgggaaaactagtgcctttaagaggtgaaggttttaatcaacctgctattattacattagaaggatgtttcccgaaaactatggatagaaaaggtattattacagaccctcatcatccaatggttgccaaacatattaatagactcaaatcaatcccaaatatgaagtatatcgggtatgatgcagttactggtacttggaaattcgaagtcgaaggttgttgattaaatgatagctctcttttttagaacatttttaattgtatgatatatcattatctgtataaaatttttaaactgatgtaaaaactaaattacagtaaaattaattattctttgaacttatttctgggctctatgtattttcatacgacatcaaaattgttgcggtttaaagaactttactacctaaataactttttttagtgtaatttttgttattaaaagctctggatatattagtattattttagcataaaatcctagggtggatgacctgttaaaaaatggttttatttgtatgttttaattttaaaataaaaatactttacaaaaacattttgatattttaaaaaccatttacgttttcaaaattaaaaactttttttaaaaaaaattttacctttttgagttattaatacatcttaaagttatagtgctacacagcagacaaatcgtttacagtttatattaactaaacaatctcaaacctctaacatcaaatttatcaaatgcaagttgaaacatcaagatgcatgtttgacagaacgcgatttgtatcaaatttgatgtaaacaaacaactttaccaaatcactgatcttctttattttagcaaaagttttaacttgaaataaactacaaaggactggatttcacatgagtttcaatagagaaaaggacgtgaaagaaaatgaacagctgtttggagaaaaagatccatctaaaatcaagagattatcattaccttttgccccatctaataaacgaaataatatacctaacagaagacatactttagtgcccagtagaagtatcttaaaagctgtcgtagattcaaatttcaacaacggatatagcatctgaattagccaagaaaaggagaagagtttcttttgcacctgaagtaactttacataaaattaattttttgaaatcttcagaggaaagaaaacctaaaagacgaagttctttaggtggtgtgaatcctaatcaagataataatgattcaaagttaagtacaactaagtttattgaaaaaattcacaaactggagacaaataatgagaataataatgagaatataaaactagataatttgcaaataacgaatcaaataacgaatcaaattatgattgatgaagaaacacaaactatggaaatgagcgttgaactaacacaacaaattttacaacaacaggaaaatatttggaatcagaatactgaacaacataatgaaaagtcagtagatcaagaagaaaagtcaaacagtttgagagaattatttgacgatgtggaaaaggagttaaactcagataatgatgaaattgtggatatagaatttacagaacaaataacaaactcaccaataaaaaatatcactgataacgaacatttagatagatcagaaaatgtggatgaagtgactatggagtttacagaacctttatccttgctgaaaataaatgataatgccacagagtttaaaaaagttaaaagtattggcaataatttgaaagagaattcaatagacaacaatgatgaaatcgaccaaagtgagctagataatggatttccaaaagtaaaccatggattattacaatcccaagaattagcagatgacgatcaaatggaatttacggagccaatagaaacaccatttggacatgaacacaactttgatgacaaaatacccgatgatccaccaaagatggaatttaatattcaagaagttgtggaaaaaaatgatgagtctaaacctatggaatttaccgaaacaataaactttgacgaatctatccaaagaattacctcagttgaacatgaaggagttgaagattcacaagaagatgaaaacttgagttccgaagagaatggtaatatcattcatcgtgctgctatcaaccctaaccaagaaaatgaggttattcattcaagagcaaaactaagagaacaaagtattgataagattggtcaaactcccatagagacaaacttagaaaaacattcatcaaaaatgaattcacctaagacaagacatcgaaaatcaaaattataatctctttgaatctaactcaaatctaactactgtagaagaaacctctgaaccacctacaagctcaacttcaaataatgaaaaaagtaacatatcaaccagggaaaatgaggaatttaatcacgaaacagaatatgcagaatataatgatatagataatgaaacataccaacatgacacataccaacatgatacaaccaataatgtatcagttgatatgacaaatgaagaaaacgaaatgtcaacagatatggaaaattcattggtaggtactgaaatgattccattagcagaagttacaggtgattttacagaaaatcaagatgactatgattcagacaattcatttactgatgataatcacataaatgtgtcacttgatacatttttgagtgatgttaatgttcaattctttgattatattgggccatcagaaatggaaatatctcaaacgctgaagtttaatccaaatatcaaatcatcaccagagtcgtcatcttcaccatcaaccacaactacaacaacatcatcgagttcttctacaccattcacccatagccaagcaaaatcaaacttgatggattttatcgacagttgtataaatattccatactatcattatgttattcatttgattaatcaatacagatcatcaattcaatcgatatcaacaatggtaaatactttttcaaatgatgtgttagagtttaatccaaccgcaataagagaatattatcaacaagctgatgatcttaaatccgatttatctacgaattaccaagctattgcatcattcacgagaaaacaggctaagtgtcaaaatctgagatttgtctcaagtcttttggaacaacttatattatcatatgaaagaaccaatctgggattggaaaaagaattaaataaagcttttgaatggagaagaaatgtgttgattgaaagacaaaggatgattgagaagaaaatggaattagaccaatacattaccagtcttaacacactgaaagacaactggaactccatggacattgaaagaatgaaaagggctaatcaagacatgattgctcaaaatgaattaaaaaatagtaccaaacagaaaatttcagaaatatccaaatcactgggaagtaaaagtaaagtgttagatagtaagagaaagaagaaagaagatttacttaaggaaattgaagaactcaagcgtgatatagctaataaaacaatacccgaaaaattagacctggaaaaggtcagagaacagctgatacatttagaaaaggaaaaatctataaaattactatcatcaaatcctatatccttactgattttcgatactttaaaaattgtctttaagaagcttaatatgaatgaatacgaagtatctttggaatccatgaaaagtgaattttttaaaccattttcaccactgtttgatcagtttgtttttcaaaatactaaaactgtcaaagcatcagaagtcaacatttatttgaaaggtttgattcaatcatggaaagtattctctagtgtgtggaaagagttattaacaatccattatcttcattcaagcagtataacgggcgaatcattcaaactggaattccaattgtcacaacctattggtacttcattatgcaatcacatatttgtacaaggtaatataaaggatttgctcagtaaagatgaaaagattactgttaccgtcgaaagcgagaatccataccaagaagatatcaataaagaaactgttatagagaatctcagaatattgtttcaaaacaaaaatagtgttattaatagattatgtgtagaatagttgtataactgtacaaaatttgtataaaattgtgtaaaaaaacttgtcgaatccattttagattacactgggtatattaccttctttcataaagatcatcatcgtttatatccaaaaccttaatatcatctaaaagatcattcataataatttttttattatttttttcaaagtcttcagcacatctaatttgtgcttctataatactagtaggaacatcaaccatacttgtgttatcatcattgcatatattcattgcatgatcacaatcctttttagaattttcaggtcttgcaaattcaaaaccttgatacttatgatcggttttattagtcttttctttattcttcccaaaacttaaaaataattcttcttctgaatcatcatcattatcattatcactatcagatttatatgagtgtttcatcaagtttagctttgtaccgtaaattgaactttttgttagattgtttgaaggagtgacagatcctcgaacttttgaagtttgtgcaaacgacttcataatggaatttcttgcaccatcgttatcttgatcatcatcatcctcatcatcaccaccacttgtgaaaactgcctttctaaagctgggcttactatttgcaggatctgatgatatttttctaatattatttggatcaattgaactatcattgactttatttgaccaagtataagcagaaactgattttttcttaaattccacaggtttattcgtttcaccatcactacaatcttcatctgaagaattatccacagaatgattgataaatatagctcttctaggtgcttcagaagactttttcattgttgaattatttatcattggatttgatgccgccacttgtcttccattatttctcattgttattgggcttctatgattaacagttgaaatagaggctgatgattgaataggagatgttttaactttaacaggtaagccccttgagaaatttgtatttgcttgattaatgtttgaaagagcaaatgcagtgtttgttgatggactatttgaaattttacggaccattggtatgctttctttagactctcttctatgtacatcgtcctgaattggcatagcttcagatgaattagcagccatcaaatttggagagtttctagctgatgtagagataacacgaacaggaggtctgctgttcagactcatatttctacttgaataactacctactccactcatcggattcaaaaattttgagtatgaatcagtcataaaaactatctaatgatgcaaaacttggatttactgttagttgaacctgattcaaacttttcagcatcattcaaatcttttctataatcatacccagcgactttatcaccttcacgtgtaacctccacttcatctgatgaaatgtcattatttggactactagcatcgatgggggtttccggttcaacacccagcgtacaatcagtcgacagagatggaatttcttcatttgtggtattagttaaatggttatcctgtgattcatctgatgatggtgtttcatattgtatattttctacaagcagtgcggttgttggcctagattgatttaatgtacattttagaactatcatctaacaatgataaagaaactcgtgatgaatttttatttctttcttcagataaaatgtaactacaatcatccttcaaattcagaggaagagagtggaaaggagcgttcaacatcctttcagagttgatcttatttgaatctgatttctttcttttaaatgcatctgatattttctttctaattctgttacctaaaccaacaacagcatcatcaacttcttcattactaacatcaattttcatattttgattccatcttgaaaattcattacccacaaagggatgttgcacaatttgatcaatatcgatacgggtatctggatttttgtcaagtagtttcattaatcaaatctttaacaattgttaaatctttttcatttatttgttctgcaacacgccagcgtgttatatcagggaatttaacttcttgatggttaatactttcaaataattgaaattcagattcggcataaaatggtagacatccaaaaacaaggcaatataatgttacaccaagagaccatatatcaattttattagtaactttgatttgactaccctgtgtagaacacaattctggagctaaaaaagctggagtaccagcagttttagccaactcaatatcatcttgaatttctccatctagattagcagcaaatgacactccaaaatctgaaattttaacttcattatctttactaactagcagattggatggttttatatctctatgaataatgccttgatgatgtaaatagtctaaaccactcaatacatctctgaagatcttttttgtttcctttaactttaacagaggttctggagttaaatcttctaaaataatattaccactaatatcatttgaagttgtttgaagtttagtcaatatttcctcaggagatatttgccatttaacttcacccttttcaaggtattcaagaacaagataaatttttcttgaattttctgcatctagtacttcaattaattttacaacatgaggatgatcacattttttcatgattgcaatttcttttcttattttatcttcttgagtttgtccctttacctctagttattctatttagtaataatgcgggtttacctgttctatcgactatttttattgcaacatttttaccggttgctatatcttttgctaatttgaccttaccatgttgacctgaaccaagatcttttaagatttcataaggtattcaaaattctctttcttgtcactggatcatattcaacatgtacataatgagtttctttcacacgtgaaattttagaattttgtgattcgttattagatgataaattagcagttgaactcaatgatgtatttgaagcactttctttcaaagttgatgtagtggtataattatgattatttgataaatttgatgcatcccttgatggactcatattctgacaaaacaaagttctcctcttagatgttcttttaccagctctagcaagactcgttaatgaaacatgtgaactttctctagatggaattggagaagaagttgcggatcctttagagcctagtaattgttcatgtgttgttaaattgttatgattaaaatctatacttcgacgagttgaaaaaagataatccgttactttattagcctaattctgatatttttgaatgagaagatgcaactggtgaactattagatgatatttcaccatcgatagatgtaatatgctgtggtatatttgaattagtaatagatttagttgaactttgtgagtttctcggatttcgatcatattcatgattaatatcaatttctaaatcatcattactagtgtcagaaaatgaagaattcagattatttattgatgatttaacttgaatattagtatttgtagttgatggatccgtacttggctttatatttaccaaagaaattggatttgatgtagattttaaattatttatcatgtttattagttatagttgtttgccacagtccgttttatgcaaacaaaaaagtttatttaaggaactggggggatatgttttgggagggggttgacttgaaacttgatgtccaatactcaaatagaacttcaatcaattgacaaggttctaaatgtatatttgttagagtatatttctctgatcaattgtcacaagataatatcaataaatcaataatgaaaacgatataatcacagaattagccagtggaagtaaaaaaacttcgatgtcctcgcagttaaaatctcaagtgactgattttttcctatgttataagtaagagctctttctaggcctttttcttcgctatttactacactgttgacttaacaatcattatttacatggttttagatatatacaaatacatgaaatgtatagagaaatatttatataaatttgtactaattctaatcgattgggtagtatttattacctgctgcatcatatgcaatttttctatcttttctattatctctgaaaacacggccgtatctgtaaccaaccttaccaactttaacaggtgtaaatttaaatgcatatttatcacctttatacattgaagcaataaatgaaccatcatctttcttctgtgttgcttgattatgagatgaatgttcaccaccttcagataatctctctaatgttacagctgcaggttctaaattaaattcctttgcctgcatcaattggaccaaatggttcagattctgcaattgttaagaaacgtgattgtaatgtttcctttggaattggaatttctgttaaattctccgcattcttatctgatttaaataatgggaacattttatacattgtttctgacattttctttaaatcatcctttattaatccttgttgttcccatgaattttcaacttcttgtaattttaaaattgcttcaattctttgaatctttaaaccatattttaaagctgcttgttgagatgatatttgatttacaagaatatcttcaacaatttgtgctttagtttctttactaatttgaagatttgtaaaacatttagaatttaatggaaatggttgtaatggattcttagatctacgtctattattttgagtatcatcagtttctctaacatcaaattcactaagtggttcaagcaatgcattacctctttcatctcttggatcaatataattagttgaatgattgttttttggatatgtatatttgttaagataatattcacctttataattctttggaccaaggaattcatccataagacgtttgaaaactgtttgtttacgaccatttctagctggtggaatattacctgcctttgaataaaatggatatgcaagtgttcttctataacgcaccttgtgacacttgttgatatccaacagtcttcacagaagacgcactactatctataatagactttgagaacatagttgtgtgttgtatgaaaatatattgtatttaactctaactaattcagtaagttcaactgttgaagatatgaatttttcagctttttcgttggcttcagaaattttaaaaattcgtttttttaagaaaaatttactaacaggaatcgacccatcgacgcaccatgtccgtctcttacttttaagggtgctgatttgacatcatgaaaggatcagcatgctgggttcaaaacttaagcccagtaagaaggggatcatgatgatactttacaactgtctaataattacaatgattttaattttaaaaatttaaataaatgtaactgtaacttataactataactgtgatataaaaaaaggaatataaaataaaaagtagacgggtttgaatgataaaattatgctgtgtaatgggtattgaatatatgaaaaatatactcaatttggtgatataataatgtacaaaataaaacgatattgaaggaaaaaaaggattgaaaatttattaattaatattaattaaatcttcaaatgatttaacaatcaattaaatcaacaacctttaagtaaacttcttcacattgggaaccaatatgttcatcgtataagttgtagaaattaccagaaagacattggtagaaaacagtagtgttaccaattgctaagttaccatcatcagagattgaccaaccagctgcatagattgcacctgcttgtggtggtggaccatcgaattggaattgtctgtttgcaacaattgaagccaacttctaccgtgagcatcagttaaaattgaatctgttaatttcatagttaaagcatttggattcttacatgagactgggaatttgttattcatcagctggagtagttggttcagattttttatcagtagcagttgaagcttgaatttgaccatcaccaatttgagttgcaacagtagcagtggaagcttgaatttgaccatcaccaatttgagtaacaactggagcttcaggttttagtagtagcttggatttgaccatcaccgatttgagtaacaactggagcttcagtcttagtaggttgcttgaatttgaccatcaccgatttgtgtaacaacaggtgcttcagtcttggtagtagcttggatttggccatcaccaatttgagtaactactggagcttcagtcttagtggttgcttgaatttgaccatcaccgatttgtgtgacaactggagcttcagtcttagtggttgcttgaatttgaccatcaccaatttgagtaacgactggagcttcagtcttagtagttgcttggatttgaccatcaccaatttgggaaacaacatctctctttgctaaagcagaagaagaagccttagttggaagtggatcaatggaaattgcgaaagcagatgggtagttggtagttgcagatgctaaagttgcagttggggttaaagtggaccatggttcagatggaacataagcagctaaagattgtgcaattaatgataaggtagcaacggataaagtagaagttctcattttaatatatttaattttatatttgtttgattatttgtttgaataaagagttgattgttctttgttcttttggatgataaaagagaatagaataaataagatagaagtactttgatctatgtggatcaaggtactcttttatacattttgaagaaaacttttaatatacaaccctccccacccaaactggtaattcaagtcagcctttgtttgttttgctggtatattatatcacaaataagatcatctattgtccaatttgaatgcctttgaaagtggctggtcgcgttaataataataaattttgtaatcactttacctaatttaggaaataattcctaattcgtacctaatttatttttagaatttcaccaaactttaatggctggtgttttcattttgctattttaggcattttgatggctacttcagcggttacaagtaatcatcgaaggctatttttatcatcatctggttaattattaaataaacgaggttttaaaaatagatcaattgaaattattttattttttacagattttttcattatatacttattatttattcgtcgatacattggatcattacgtccgttaaaaaaattaaactcatcaaatcaaaatcaagaaagtttcttaaggacccctgccgatttttgatccttttcacgttcactaactgttactctgtttaacattgccataaactctttagcatatggtgctttggtaacactgctgtcatttaaattttgaacaacttctaaataattatgataaatgtcaccattgaagttacccaagactgaattgatgaaaaagtcacttaatttgaatgaatctgttaatccaacaacatgttcacgaatctttcccagaataacatatgtttctttctctaattgcgagaatgtgttattagacagaacacctgtttgtaaaaagtgaataccaaacttttcaatattagtgtatgcaaataatattgctaaattatccaattcttctttaacttgttcgttttgaacttcacttaatttgacaatccatttatcaaggatatattcagcagcatatagtttagacaatgctattttttcatttgcaataatatcccaattcttactattgttctctaaatcatttagacatttcaatgatattctgaaaataacattttgtaaagcagagttaagcttgttaacatctttcaaatcctgatcattttttaatataacaccttctttttcagttttctttaaaaatgaatagttaccatttgccttaccatttttcaaataactcattaccctttgaattgtaattcttccactattttgtgccaagatattattatcaccttcccaagtacattgaacaacatgatctgcaaaacctttagcaaaaccagaatatgcagaataaccatgaccaccacaactttgacgacattcatcaatcaaatcagcagtcaaccaagtacaagtacttttcaaacttgcagaatctgcaaacaaacctttcaaatcaaaaatagatttacctaatattctcatatcaccacttcttacaccttgatctaaattatttaaaatttttttatgatcggattgaatttgattagatgcaatactcataccataaacccatgcaagatatggtaataatcttttttgatgcaatggataattaattaattgattttccattttttcacctttaacagtaaattgtctacgaccaacagcatatcttaaagcaattgtaacaaatcttgaacctgttctgaaactatcagttaccatcgtaaccctaccacctaataatgcaccataagataattgttctaatggaggttcaacaacattaccattagcatcaactttagtgaacttactcaacatgtattgtcttggaattctaacacttgaaaattgaatccaaccattatcaataccatctctacccattttttcaccaatatcaccaattgcaataccaggatataaatcatgatttgaatctcttaatggtacaacaaaagttttaacaccataatctttatttttaacaattaatcttgcataaacaacagtatgagttgcactatgagctgcaccaccaatccaccatttagttgcaccaacatgaggtgtattaataataaattcatcagttgataaatcaagtgtagcagttgtttgtaaagctgcaacatttgaaccatgtgcaatttcagtcatactaaaacaaccataaatatctttaatatacattgcacctctttcaaaagcccaatatttatattgttcatcagtaccattacctctaatagcactcataaataatccaagatgaacacctaatcttgtacctaattgaggatcaatcattgcaattaaatttaaacgttcttggaaaacttggaaatctggtgcatcttgctccatatactgtgataaacgagcaattttattagcagttaatttacgatgttcatcacgggacatttcataatattcaggtttaacagctaagacaggatctctttcaatctgttgcataagacgtaaagtatgaagtgcttgatcatttgaaccttcaataaaagaatgcatttcatttaatgggaaagtagttaatgctctttctttccagataagttgttgaggatctggttccattgaatttgggagaactgtttgtttcatttttgttattcttagtagtttttctttcaactataaatttttatatattatttacaagatttataatattataaaacatcatctcatcgtataaaagtatgacaatagaggaaaccatgtcttttaaatagcagctataagcagaaaacagacttagaaagaaatccacccactcggagagcggggaaaaattactccgagaatgtaaattgtggggaaaagcatcgatctcatctctcttctaattgcccgaaaactgaccttccactgttagctacagtttcaccggtgcaagtcataacagttgcactgagtttagcagtagcagtagtgtttgtactttttacagtaatttgggataatggccggtggtgtggttttaataacgaacgagcctaagtaggggaagttcttagtatgatgattccaattctcttcacggtcgattgatagtgcgatggttgaaatacccgttttcacaccagtcttctcggagactagtgatttcatgtattcttctaaaactaattgaggtttatcaaatgtttcattgtcattgttatatccccatctgttattaccatgtcttctccaatgattatcttgtaatgaggaagacattttgacaactgcaattcttgaaccatcttcagtattttcaaattctgatggtggtgtaggtaaaacaataaattgcttaaattgtgaattagttgttggttcaattagtaaatgaacttcagaattttcaataggaacatactttttatcactttgtaaagctttaacaagtttagtgaaaccgtcatcaaaatttatttgtgaataagctttatcaacatcaaattgaaaattgaaattacctggataattgtaatcacgaagattacatttaccaattgaataagcagcccataatcctaatacaccaaatatgaagaatccaaatcttctacgacgatgtgatctaaatggtccataacaataccgtctatccctgaaattccaatctctgtaataatcatcataatcatccttagagttactacttgcatttgctgaattatcaacactggaacttgaagtgttttgttgattagttgaataatgtgagattaattttggttggtaaattaatctcttatttaaaaagtttgacttgattgttgttcttagcatttttgtttggtggtttatatcgattctatcatggttataactattatttatacctggaattactgctctatttaaacactttaatgttcttaagaaagtaactgatatagttatttcccgttatgaaaactccgatatatggagataatccggcgataagcctaaaaatagtccccatattattgttatcgccgcttgtaatgtcacattgccaactttttcgtgacatggcaattttcgagttcggtattgccaatagaggttctttcaccaaatttagtccagtcacgtatatcgtaattacggctccgttaaatataagataatatttgaattgtcaaaatggatacaagtcaattagaaaagtttattgaattcccaattgatttcaaaggtcaacaattagttgaacgtatatcatacgttttgataacatttggttttataatttcattatttttcggattcgcattgcaagacataacttattccttttatgcatttataccatttgttttattatcaataataattgttttaccttcttatccagcttataataagaatccaacagttttcttgaaaagaccagtttcaaaaccaattaatatcgaaataaattaagttaattgtataattcatatatttaccctttttaagtaactatatatcgatataaatttttcctaatctattaataaaataacaataattatagtcaagcattatgtcattatacttaggatttgatttatcaacacaacaattgaaaattgtttcaagttatgaagatctgtcatttcattcaaaatactcaattgattttgatgaatttagtgggaaatatggaactacaaaaggtgttattacaaacagtgaaacaggtgaagttgttactccagtttgtttattcattgaagcatttcaaactttattagatagaatgaaaaatgatggattcccattcaataaagtaaaatcaatttcaggttcttgtcaacaacatggtactgtctatttcaataaaaactatgaatctttattagaaaaattatcatcaaattcaaataattggtgtgatgatttatgtaatgggttttccttcgatacggcatctaattggcaagatagatcaacaggtgaagaaattaaagcttttgaatctgcattaggtaatgcaactgaactatgtaaagttactggatctaaagctcattatagattttcaggtttacaaataagacgtcgtgccaaagaaaattcaacaaattggaaaaatactaataaaattggtttaatttcaagttttctagattctttacttattggtaaattaaggggaattgaaattggtgaagcatgtggtacaaatttatttgatatccaaaaaaatgattggaacaatgaattattatcactattattaatgaaaaatgttaaagttgatgaaaatgttaccatggatgaacaatctaaggcaagtgaacttgcacgtcaaatgattggtgaagttgttaaacctgataataaaggattaatatctgattatttaattaaaaggtatggtttcaattctgattgtgtcatttggccaataactggtgataatttagcaacaattatgtcattaccattaaataaagatgatttattagtttcaatgggtactagtacaacagttttattattaactgaaaaatatgtaccaagtattaattatcatttatttaaacatccagtttgttcaaatatttatatgggtatgttatgttattgtaatggtgcattagctagagaacaaatacgtaacgaaattaacaataaatgtgaaactgatggatgggataaatttaatgatgtattgataaatcaatatgaaaataaacataaacatgagagtgataataagattggtatttatttcccattgggagaaattatacctaatgcaaaatcatgtaagagaagatttaaatatttaaatggtgaattaattgaattaaataaaggtgaatattcaattgaggaagaaactttgcttataattgaatcacaagcattatcatgtagattaagggtatgtccaatgttaagtgagaaatacaagggagatgagcaaaatgaattaattgaagaatctattaaacaactaaaatctattgtcggagatgaattaattgttgataatgtttcatattcaattgaagaatttattaaaagacctaataatgtttattatgttggaggtagttcaaaaaatcaatcaattacaaaaatttacaatgaaattttaagtccatcaaataaaggttatagagttgaaattggagatgcctgtgcattaggtggatgttatagagctatttggggtagtacagagaaagaattaggatttgaagaatggattacgaaaaagtttaattttaatgaaagtttagaaataattgaaagtaataatagtattgaaaaatggagtgaatattcaacaaaagttggtgttctgagtttagttgaaaaggaacttgaggtttaatattattttatttattttatactgataataaatatgtgtatctaaccaatgaataatttaccggatgattcaataataatgcgagtcggagaagacaaatgatccggagataaagaatcttttaaaattttttcaattactcgacatgattcacacttatatccgggggaatttatgaaaatttgataattggtcatcaattagtataataaagtacgggggactgtatattgattcgatatagtaaaatacaattgtaggtaattttttaaagcatataatgaaattgaatttatttaagatatagttatataatcatggtatgaaatgatacatgatatagtataatgtagttaattaattagaaaataaaaagatatatgatgatgagttattggtaatttgataagtaagacaatgaaaaacttaagcagttgcatcaggaccgagagtaactctattacgtttagttttataatctttaattgcagatttaattgcatcttcagctaacattgaacaatgtaatttaacaggtggtaaacttaattcttttgcaattgttgtatttttaatatttgcagcttcatctaaagtcatacctttaactaattcagttgcataacttgaacttgcaattgcagaaccacaaccaaaagttttaaatttaacatcttcaattataccagtttgatcattaactttaatttgtaaacgcataacatcaccacaagctggtgcaccaactaaacctgtaccaacatttgtcagagttttatccattgtaccaacattacgaggattttgataatgatctataactttaggatgataagctcttgtaagagatggtttaattgaacgaacaacagaaggacgagtagatgagaataatgatcttgcaaacattgtttgattataaagaaggaggaaataaagagaaagaaagaaagagataaaagaactgtaaatgagaagatataatacaaaaattgataattaattttaaataataacctatacttactcccctttgttcaaataataaaataaagcttaaaagatattattaatagaggggaaattctagcataattaaaccagacagacgcaacgaccggcattaccctgccttacgtaatcacataggagaaatattttaaattttaaaataattttattcagtcatagtcatcggataaagaccgccggtatccttgaaaatggaaattgcaatatttttcactctcagggtgggtaaacgatagtgaagagatttcactgattgattgtacacacttaaatataccttttgatttacatcttacaatagacaacaaaggtagtagtatataatgtcaattgataatcgtcctttacctttccattatcaattcttatctggtgcagttgctggaatttctgaaattctgacaatgtatcctttagatgttgttaaaactcgtattcaattacaagttggtaatgctgcaaatgctgaatattctggtgttattgattgttttactaaaattgttaaaaatgaaggtcctgcaaatctttatagaggtatttcagctccaattttaatggaagctccaaaacgtgcaactaaatttgctgcaaatgatgaatgggggaaattttggaagaaaacttttggtgttgatcatttaactcaatcaattgcaattcttaatggtgcatgtgctggtgcaactgaaacttttattgttgttccttttgaattagttaaaattagacttcaagataaatcaaaagcttcattatataaaggtccaatggatgttttaatgaaaactgttcgtaatgaaggtattttatcattatataatggtcttgaagcaactttatggagacatgttatttggaatgcaggttatttcggtgttattttccaagttagagatttattaccaaaggcaaatgatacaactcaaaagacaataaatgatttagttagtggtatgattggtggtattgttggtacagctcttaatacacctttcgatgtcgttaaatctcgtattcaaagtgctacagctgttgaaggtcaagtacgtaaatataattgggcttggccttcattaggtatcgttttacgtgaagaaggttttggtgctctttataaaggtttccttccaaaagttttacgtcttggtccaggtggtggtattcttcttgttgttttcactaattgtatggatttcttccgtggtgtttattataaagaagataaataatcttgatgaccttttaaaatttgtcattctattttactttttaataaatttgtctagttatattactaaatttaataatgcaatattttctactctccccggatttttaaaaaatttccgcaaacggcgataacacatcaaagtttgactaatttgtaaaaatataacaattgaattaattaattcttgatgggcctcttaccgctcccatttctcaaatcatcatgtttcttttgatattacaattcatctcacaaacaaaatgtctacaaaacttaaatttgataatccatccgtagtattacaaaaagttggtgaaattacttttgaagatagaccagttccaaaaattactaaaccaaattatgttaaaattgcaattacaaatacaggtttatgtggttcagatgtccattactatgaaactggatcttgtggttcttttaaagttgagaaaccaatggttttaggtcatgaatcttcaggaattattgtcgaagttggtagtgatgttaaaaccttaaaacaaggtgatagagttgcttgtgaacctggtgttccttcaagattaagtcatgaatataaatcaggtaattataatttatgccctgaaatggcatttgccgcaactcctccttatgatggtactttatgtagatattacttattacctgaagattattgtgttaaattacctgatcatgtctcactcgaggaaggtgcattagttgaaccattatccgttgctgttcatgctaatagattgattgatgttaaatatggcgatacaatgatagtatttggtgctggtccaattggtttacttactgctggtgtcgcatccgctttcggttgtaataaagttttgattgttgatatagttcaagagaaattagattttgcaattcaaaataaacttgcaactcatacatttaattctaagaataaatcttttgaacaattatcatcacactattaaatcaatttggggtgaaaataattatccaacttgtggtgctgatgcaactggtaataaattttgtactaatatgtgtattagatcgttagctaaaaaggggagatttgttcaagttggtatgagtggtgataatgttgatatgttcccaatttcttcagttatggaaagagaattgacagttaaaggtagtttccgttatagtgtcgatgattataaatatgctgttcagttattaaatgatagaaagattaatgttaaaccattgattactcatcgttttaaatttgaacaagcaattgaagcttatgaattctcaaaattaggtaaaagtattaagattatgattgaaggtcccaagctgtaattgatcactgatttatattgtatgcataattcattttacttttttctcttatttgggtttagtttctatattacacagggtattatatagttcaatatttacacgaaaacttcttaagttcaactattcatccttctttgcagcatcattttcagcaaataacttagaatgttgttcatcatgttttgctctgaaaaatgtatagtgtaaaacaacatcttcaatatttctcattgctggatctcttgaaaattcaggatcgataaagaaaaataatggcatatcaacttcttcacccttttgataatctttgttcctcaaaacaaaaacattgaatcttattaaaatatggtgcaacatgatctggtgtaactgaatatgttgccatacctgtaatatctttatcaccaacatttttagccttatagaatgctaatgcagtttcacctggaacaacccaaacttctctttgttgaggtacaaatttccatggtaatgcaccacttgtttcagcagtaaatgagattctcaaccttctctcagttgcaacaggtgataatttatctcttgtaaatctagttgcatcagtaattggtgtaccaccccatcccgtacgttgacaaatcattctataaattggaacactcgcatacgataatgctaaaaagatcatcatcattgataatgaataataaattgttgtttgtctatcatatttatccttctctccacgatattcctctctaagtctcttatattcttccagtgacatttttggtaattctgcacgtttagatcttggtgattcagtcatcttgttggatccagcacctggaacttcatatagtatacttcttgtattatggaaacttcttaattgattttgaattgtaaaattcatacctgctaatttattaaaattactactttgaacgaatttcgggctttgatttaaacctcttgcaaaatttcttgcattaattattaccagtctattcatttctataatctataaatagtattacactggttactattgcttgatacaatattttatgaagaaaagatactatatatccaaaatatttttattttcctgtaattttcactgattacagtttcggttttcattgattttctatagtgcgagaacatgtctttttttcaaaatgtcaccatgatgaatgaatcaacagataattagccagttagagaagaatacataactgacaaaaaaacatttacaataatcaacaaccgagttgttggaacaaattcaattcaaagattttgtgtataacattttgagcaaatttgcatcacaaaattataatgattttgattagttatataaactatttaaaaaaattaatataatatctaaaagtcttcctcttgaagaaactgtaaaagttcttgttcacgttgacgtgcttcattatcatcatcaaatttttcacgaccagttgtcattggatatctcatagccttaacactatcattgtttaattgcatacagaatttaattctacgatcaaattctgcttgtggtgccttagtggtgtaaacatctgatacatctaaagattcaatatatccttttgtatgatttatagaaatatcaacaacgccatccttaattgcctttgcaacaatatattcagctgttaattcattatcaaggtgaagttttatacatatgtctttgagggaaatacatttatatgataatgatatgattctaatacctgttttaatcacattttctcgtaaacgcaaaactaaattataagttcttatcattctttaaatgatcaccatatgtttttaaagcattgttgaatattttcaaatcacctaacctaacagccttggtaacttccgcatatggtcttagagatttaaataatattggatcatcaaattgtgataattctggtatttcacctgttagtaattgaattaagatttgtaatttggtagctgattgaaggaaacctttggcatttttagtttgtgggcattttctaattgctgtaataatacattcgtttgctgatgagtagtctaattgaatagtttgaatttttgctaaatagtaatgatatcttgcaacaatagaagtagttgcttcatatggaaactcaattttttcaactaagttatatgccttgattaatatcatttgtaagaatatagtttcttaataataaagttataactgaagctcttgtctcggtatcatgacttaaagttgcagttctcagtgcattcattaagtctgctctaatattgattaaatcctttgcaatttcacttgatctaaaaatataataccaagctttagcttgtatgtaatctaaagttcttctattgtattttttcaatagctcaataacgtttttattaaaagcatacaatgctttaatttcaccaatatcatataaatatatttgaaccaattaaatgaacaaaaacatcaatttcaggggaaacttcagtaactgtatgatcatctgaatccatatcaacatcagtatcagtttttgaaatctttttagaaaaaggggtcaatgcaccaacaaggttctcaacagttgggaatgttgtcggataagttttgttaataagatctaaaagatcatcagctttaatttctcttctaattgctgcatgttgacgaaagacacgcaaaacataacgtggatcaaacttgacaacagagttagttatcaatggcaaaaaagattctaattgttgtaaaacactttgttccattaatttcagtaattactggttcttcaacactagtcattgtctattgaagtgtgtggagtggcaaataaagtccttccttcaatctcatacaaattttgatgtggttactaaattcaaaagattcgccctcttgttaaattcaatgtaggaattttccagccgttacgtaattaccgtcgcgccagttttatttgcttacaatcgatgaagtggattaagtcaagagagggattgtataggttgattctattgctatagatagacgaagtaactagatacatctatgtttgggcaaatatgtctgacttgaatttagtgacacaagatatgaaagaattaactgaaaaattccaaaatcttggaagttcggttatttcaaaacaaagggaagaattagaaactcaacttcatgtatttcaagcagctttacttgcatttaagaatgaacatgtatcagaaattgtacaaaatgaagaggttagaactcagttttctgaaatttgtattgcatttggtattgatccattagttgtagcctcaagtttatcatcaaatacagataacaactccgaacgccgaagtcaattatgtttgaaaattatcgagatttgtgattccactagacatgttaatggtggtttaatattattaaaagatttacttgatttgataaatactgacacatgggtaaatcaggatttaaacttaaaatttacaacagatgatatctcagatgcattgaatcatttacaagttttgggaaatgaactcgaagcttattaaaattgggaagcatcagtatgtcaaaaacatacctcaagacttgaatacagatcaaagttccatattgaacactgcatgatgtgcttcggatatgtttcctatctctatattacgtgataattttggatggaaaaaagtcagatgtaccgttgctattgatgaattagtttcaaatggtatattgtggctagatatcagagaaggtcacgaaactaaatattggattacatcttggataaacaaaaatctataaagttaataaagggattatgaaatatataatatacaaagttaactaagatgtgagatgtattggaatgcaaaattcacagtatcatatggactctcgttttgaatcaaaaagtcttcgttttgatctaacatatcatggtttatatgattccatgtagtagagtcaccatataacatagcagatggcttaattctttgctttccactagcatcacatcgtttacatttataagtatcatgagtctcacaaatagttttggtattaaattgaaataattgtttcaaattgtcactactaaaaagtctttccacatcatcaactgaatcaacaacacatgacgataattgcattttggcactctgtctctggaaaatcttttcttcaattgtacccgtggaaataaatctgtaaataaaacaatttttcttttgaccatctctccaaactctggctaatgcttgttgatcagatgctggattccaatcaggatccattaaaattaatctagttggcaccaatcaagttgataccacaaccaccagctttagaacttaacaaaaacacaaattcttttccatcgggtttgttgaatttatcaactaacttttgtctcttgctgatattcatagtaccatcaagtctcaaagatccgaatttatgttgtctgcaaagtttttcaaccaaatctaatgtttgtgtatagttagaaataacaacgattttatcatctgtttctctatcaatcttaaataaaaatctttcaagcatttgaaatttaccactataccaagtttgaatttcacggtttctacccatactatttgtatcatctttataatcttctggaattaaactttcacacccttctatatcatcaggtaatgataacaagttaggatggttacacaatttttttaataatccaatagctttaagaggttgtgagttttccccctttagtaactttttgatatccggtgaggtgatgaagtaattgtacaattgtttttgcatatctgataatccacagaatatcacatattcgtacttcactggtaagtatttactcaagatatcattagttcttctgataatgaacttttggaccaattctgtcaattctttcaatttagcatcacccttctctttttctttatctgttgctaatgaatcacgtcctcttagaatatgtatttcatagtttttcctaaactcatttctatttcctaacaatcccggattggcaaagttcaataaggaaaaatattcggatagatcattttgaatcggagtaccagataaaataatacgtctttcacaattgatggaatttagagcattaaaggttaaactatcaccattctttaatctatgaccttcatcagcaagaactaaaccaacttcacaattatttaatttttcgaatatttctacgaagtgtttcataactaataattaaaactggactcactataccattaccagttgcatctgcccaattttcaatagcatctccaatactggaatccttttgttgattttccatcgatagccaatgagtttaatacaccaacacctaaccatttgtcaatttcatttgcccaatttctaaccaaactggatgggcaaacaacaatacacttttcaattgtcttcttacctcttgggccctgtttcaaaagtgtccacattaatgttaagcattgtaacgttttacctaaacccatttcatctgccataatgcaacctttagcttttgggtgaaccaaacctgcagtacatctatatagaaatcgcagaccttcacgttgatgtggtctcaaaattttagcaagcttaggatcaataacaactggaacgttgggaaatttagccattggatcttcagttttatctgatattcctaataattcattcaaagaccttttgttgtatagtttaaacttagaaagcttttgtgtagatgtttcaaactcttcgataggattaacatcctgatttcattgctttagctctagcctctgccagtgctttttcttcctcttctttgatttcgggtatcacatcaacagttggatcatataaaactattgctaaatcatcaaaggggtcaaataagggtcttggtgggaagaaaactttttttctatttcctagaggaggaggatttttcattaatatactttcatctttattctttaatggtatagtaaatttacgtgtcaggatcattctattttgatcaacatcacccaaaaccaaccttgggtgaagtgcattctttcttttcattgagttgttttgactataactatattcatcgaagtaagcttggtctttagcatttgaagcttgaatattttcgccttcagcgtaagttttaggtcctctcaatcttgcccttcgcactactcttccattggcagtgacattcgatgctccatttcctagtacatcccgagttgccggtcttgagattggtggtttgaatggtttgaataacgcagaagggtcggtcaatgttcttctacgtttaagtgaagggttcaggcctgcacctgtacccagagcaactgaaacatattttggttctttaggtttatttttgtatctaccaaaatcagtttttcccatttaatttcaggttctcaaataagaaatgtaacgtatatgggtttttttaaagacggttatttaaatagtaaagataaaaaaaacacgtagaaaagatggattttgtaaatttgtattagctgaattttttgtaaacatgaaaacgcggtatggacatcttcaccacttcctatttaagtaataatttcgatttgatgctgatgtagtgaatgtaatattattgaactatataaaacaatgcaacaggtaatattatatacaagaaaaattaataattaagaataatttcaacaataattgatacagtgactccaacaaaccacaaaaatatcatccagattccgacatatttatcacatctccatcctccaaggggtataaaaattaataatataacaacaagattgaacaaaagtccaattaaacataacgaaagtgatacacttgcaggtatttcaatctcgttatatcccatcagcaaaccatttaaccctaaaccaagaagaatgttcaatagtggtcctccaacacaagatgccaatgccattaaaggatatcccatcttagatatgacaattgaggaaattaaatcaccaactgaattacctaaagcaaataccgtaatacccatagctgatggtttaatataagttagagaagataacaatgtgaggatagatattacttctgacgcaatgatggaaatccatgaaattgaacacatcacacctagtacggaaatcccacattttattagaattgatgggtttgatgataaaattaaattttggtaagtaagataagtaaatccaatagttggtataattgatagaatcttccagatcaatgaaatatcaggaaagaacgtcgcatatataatgaaaggcgatagcagtaatgagaccagtagttcaacaagttttggaagtgaaggtttgtattcaccattatagtcagcttctgtcattattggtattgtatgagtgaagagtttcaagaaaggtagtgtgaatatttcaaaaattatttcaaaatgtgatttttgacgtggttcgattaattcagcgtgtatatcaccaatttcaatactatcgggattactatcttcactatctctgtaagtatttcctaacgtatctctataaattccaacttgtggtttgtttgtaatattggctaaaatggaagtgaattcaatattccttattagttgtggattataattatatgaatcatctgggtttgattgactcaaaagcataataaagttattacttgctggattctcgtcataaagagttctagcatgtctgtcaattttggatttggcaattttgttgtcaaaataccattgccatgctatgatcaatgtaacatatgtaaagtacaatgagactaataaccacatttcaaatcttgttaaaacaccatctctaatacaatacaatagtaatatagatgcagcagtgaaaaagaaaacgtctctcaaatatgtacttttggcatttaaatcaatcaacttttcctcttccgttctctcatcagttgacataatttgactattttgtctattaaaaggtaacaaatcaaaaggcttaattatgaatataactccaatgacaacagtattgatgaaaaatgcagcaccgataatctcaccaaaagctaacgttgtattacccgttttgaatgatgtatacgttgatatgatatcaggagacccgttagcaaatgcaagtagtgttatcccggatacattttctggtatttttaagtatgatgttatagcatttaaattcggtacaagacagttacctgcaacaagtccgatggacccgaacaacaccaccaaaagtaatacaagtaaaggtattccaatccaatggcgtgcggtatctgatttggctatacaataataaaccgtaaaggagttgataaatcctggataatcttgacattggttatgcacaaattcacactgttgagcattcggaagcagatgaaccttttcacacgatagtattggtattgaactcatcatgtttcttgtaagtatgtattttttgtagatttttttgaagtaagtagttatgacttgctttgaatgatatactcacaaaaatatagctttatacgtttgataacaggtacaataagacttcttccttgatagtaaaaaaaaaagaattactaatgcaccagctccttcttttgttgccataatttttttgcaggggtatataagaaagtcggaatttcaagcgattattttatttttaaagctcggggcaacaaaaaatgaaatcatcggatgcacgaatatttaatactggggatgaggaagagctttactttatttcattcttttattttgaagttcttttctgtttggatgatcaatcactcttcaaagagatttagatttttgggaactttatcaagtgtattcaaaatgaacgaaattttcaaaaccaaacctttgataattgacaatcatggaaaattacgagaaagagatacaggaaggatgttccatattcacggaattaactttgcctcaaatactaagcttcctacgttgccatcacaaaacactcatatgaatgtagataattgtggcttctatgagtcagctgatactatatcttttgttggaagaccattcccattaagtagtgcttacgaacatatttctaggatcaaacagtgtggttttaatactataagaatggtcactacatgggaggcgattgaacatgaaggacctggaatttatgatgttgaatatgcagattatctgattcaattattgaaagtaattgaagagattggaggaatatacgttttcattgatccgcatcaagatgtctggtcaaggtttagtggtgggagtggtgcacctatatggactttatatgcagctggtcttgagcctaagaattttgaaaatacattagctgcaaaactacatcacttttcagctgaacctgaaaagttcacaaagatggtttgggcaacaaattataatagattagcctctaaggttatgttcacttgtttctttacaggaagtattttcactccgaatgcaattattgatgataagaatattcaaaactatttacaagatcattttattgatgcatacagtttccttattcatagaattaaagatcaagcacctgaaatatttggatcgtcttttctaggtgttgaaagtatgaatgaaccaaatggtgggtattttggatttggtgatttgaatgagctctcacacaatcaaaatctcaggttggatgaaactccatcaccaattcaagcattcagattaggtatgggatatccggagcaagttgatacatattctttatctataattggcccaactaaaaatggtaccaagtgggttgatccactgggaactaaagcatgggtgacaaatgatgataataaagataaacattatggatttaaaagatcttctcaatggagattgggggaatgtatatttgctcaacatggtgtttgggattcgcatactggtgaattgataaaacctgagtatttcaaagttcatccagaaactggagaatatttgaatgatgaaaaatttattaatggaccatttttaaagttttggcataaatttaagactagtatgagagaaattgatcaagatatgtttttgatcttacaaccaccagttttggagattccaccgaaaattgcaaataattcggattaccttgatgataaaacgatgcttgcattacactattatgacggtatgtctttgatgtttcaaaaatggaacagaattttaaatgttgatactttgggaattatgagaggtaaatatattaaccctatttttggattagtattaggtgaaaacaatattagaaagtcgattagaaaacaattaaaggaaatggctactgaaagccagaaaaatgtaggttatgatatcccggtaattttcacagaaaccggtatgccttttaatatggataacaaaagagcatatattgatgggaactatacacctcaacaagatgcaaatgatgcaatcttatcagcattagaaaacgaacaattgaacttcacatattggtgttataatcctgaaaactgtcatgaatggggagacttgtggaacttggaagatttctctatcttttccaaagatgattttaagaatgatccatttaaggactacaataattatcatgattgggtggtgggtaatagtaagaaaattatcaccgaaactaatagaattaattcatttaactatgctcctcatacaggaaactccaatgatacggactcaatacacagttataatcatacaaataatgataaccattccttatcatcggacagatcagtctctaatggatctatcaataaatctttattgcgtgagaatactcataagtacttacattttgaagaatcatatttagatttgacaaatggactaagagctaaaaatgccattattaggccagttcctgtattgattaatggtgaaatattggagtgtgaatttaatattcacacgaaaagattttacttgaaggtaaactgtcatcgtcccaaatcaaactcattgcctgatattattgttatacccaaatatcactacgatgagaataagattaaaattgttgctacagaaggtacaactatgattaaaagaaatcaaattacacaatggatagaatgggatcataatgatttaacaaatcgaaatattgctttaactatcacattgaaacattcatcaaatactgaaaacgataatgaattaggttgcggtggtttaaaaggcctggcctgtggatacttataaatatgttaatatcacttcacaaattcaattctatgataataggggaaatttttgattcatgtatctgcaggcttggacactgtttaatatttattttacaattgatttttggtagtttggttgttatattggctgcatatttttgtcaaaatgaaaagaaggaaagtgattagggataaaagatcataatttaggtaataaaatgtttagtatttatatagaaataaataaataagtttaataatgaaaagggatagaaaaacggggtggtattagtaatgatgctatgataatttaactaatcaaacatatttaagtaagattcagcaacaaatctagctcttgcattcaagaataatttcatctcacttatttctttatcaacatcttccataaattcaatgatgaagtcaaccaacttttgtttcatcataagttcttgatgataattagttaataggaaactaatatcataaccttcaacgggtacccttcttaaaattaagaaattctctgctcttttagttaaaaatcttgtaaatttatcaactaaaatttcttcaatttcatcactttgtttaattttgattgatacacgtactgaattaattgatggttcaattaatacacgttcacttgcattacgtgatatatgtaatggatttaataagatttcaggtgaacgtttattttcaatttccggatagttatgacgttcaaccaattgagaactaaaatcttgtaaacatagggatgaattgagtgagtgacgtactgctgtaagatatggtttaagtgattgtgacattgatctatgctatactaatggggaaacacaagaacaattagccttcctgtaatgacttactgagactcagaaagttacattatcatggttctcttatagaattgcaagtgatggcatagcaaacggcgcgactgtttcatactctacatgtgtaaaagttgttcaagagaagcattaagtgtaaacctgtattaagatattgtttctaactaatggagtggcaacgtgtggtggatgaagagagtggaaggccatattactataatccaactgatgaaacaactcagtgggaatttccagaaagtttactagaaaatgtgctaaaaaagcacggatatattaaagttgcaacagatgaaggtcaagtgtatttctatagtgaacagatagacgagagtacttgggatgttccagtagatgttctcaaagagttacaggatattttaggagaagaagtgacagagaatgaaattaagggtgttcttccggaaactgaagcagaagaaaatgaaactgtggcagaagagccaaaacaggaagatattccagaggaagctaatcctaaggaagaaatgatggaagaggatgttgttgaaactgataatgctaaagataaccgaataaatcaaatacttggtatcgtggaaagtaatgaagatgttgagatgtcagaaacttctaataataaggactttgcacgggagtttgaggaaatgttggattcattagacattaaacctactcaaagtgttaaagatatacaaagtaaatgtttaagtgatcaaaggttttggaatgttgagtcaagtagtaaacgtaaaaaattgataaataaatttctagatgcaaaaatcatcgaagaacgaaataaacttagagaccattataaagaaattttcattgactcgttcaaactgaaagatgtcaaatattacacaagatatgaaacatacataaaaacttttaacaaagataatgaaaaaagatatgcagaagtacctgttgatatgcgaaaagaatttttcaatgaatatgtcaataaactacgacagttacatgatatggaagtgaaagaagatttaatcaaacaacgtactataattgaaaaggaaatggaacatgatgttaaaattaatactcaattcatgaaaatactaccaatatacgagaagaaatttagcaatatgaccaaactggactttttggaagcattcagtaacgtgatcaaacgtcgagaaattgaacacgaagaagatatagaaaaggaaaaaaatgccaactacagagatgataggaaagcacgtgaagctttcaaagatttgcttgaacagatgaaaatggatggtgagatagaatttacagctaggactaaatggtatgaatttgttttggaattaaaggataaacctcaatttattgaacttgtaggacattctggttcttcaccaattgattatttttgggatagcttggatgctgaaaatgaaaaattaaaggctaaaataagtttcttcaagcaagaattagttaatttgaacttagatttcaattctgttaacaaaattgattttgttgaatacatgaaaaagagtgggaggtctgaaataaaggatataagcattactgattatgaaactatttatgatataatgaaatcggagaatcaatcgacaactatatcccgtggtgttaagagagaacatgaaaacactaacaatgatgttaaaagacaacgtattttatttcgtaaaaattaataacatcgatttaagttaaagctttatatatatatatttaaatctagaaacatctattaatcttggctaaacaatgccgatatagctaacgctgcaaacattgcatatttgaaatattgattttcagtaataagaattgtaatgtatccaacttttggaatataacctttaacattaccgataatttccttttctctattaagataggttttaccgtatccataaagtggtaaatcatctctttcattattatcacctttagttaaaagatattgagtttttttagaagtttctaaagtttttgattttttagatttagatattggttcttctactacatgttgatgtaccactctatgaacaattggtatagatctttgaggtgcattgtagacaacaatatctccaacatcaacataagtttctctattccaaaggaaaagaatatcaccacgttgaaatgctggttccattgaacctgaaaggacaacaaccaatggagatggtgaatttgtgatgacagcgagacctttccagattgcaaaagcactggtgacaaccattgccattgtcaatatattatgtaactgtacacgtaatgatttgagattcattgtctgtttgattgtctgttaaagaatacgatatatacctataggagttttaacacagtggtgatcttggccttatgggtttattatagcagcagctactaacaattttcactgggtatcgcgtttgtttaaattttgacatgttgtgagacgacaccttaatctttcatgatcttctcttttgtgtttttgaagggaagtacattataacattatatctatacagttatacatcagatatgagtacaagtagatattctgcaaaggcacatcaaagagatagacaaacattgtttacatctgaagatttacaacgatcggcatcaggatcaccaattcctaattatacaaacaatagtataccaatttctaatccatatgagagatcacgattgccaaatttttcaactaaagcagctgaaatggcaatgcttgaatcccaatctgatgatacaatgaatgaaatgaaatataaattaggtgcattaaaggatttatcaattgcaatgggtgatcaaattaataaatcaaaaaatacactcggtgatttagccgaagatatgggtatgtcaagtgaaagaatttctgataatatgaatcgtatgcgtagatttgtagaacaaggtggtgttggctggaaagtttgggcaggttttacagttataatattatggttctttgtatgggtttggttattttaaactcgttaatcttaaattatgtgtattaaatattaagggttttgtaaaataaatttagaactccattgattaattaataaatctttactattctttaactcatatattattactattacattatagtgataagatttttgtattttgttttctgttaaaaaaaagctataataaaaagaatttgcaactaaatatactaattattcaagagtaataaaggttaattatagacaccaactcttgaagatggtgttatataatgatgatcatcaatcactaatttattaggattgctattaatataagattgatcattcttttcaatacctataccacctctattacctctgctacctctgctacctctgctacctctgctacctctgctacccatataacctctactacctctaccacgacctctaacgctggaacctctggctctgccacggaaagttcctctacctattcctctacctctacccctacctattcctctacctctacccctacctcttcctctacctctgttgttataattgtgactataagtttcgttatcaccagaactatcagttgatatattatcatttactgttcccaccttccaatacgctaacatcatcattcaaacttttattgctaccatcaccatttaaacttggaacactaacatcattatccaaacttgaactactaccatcattatttaaacttgatccgctaccatcaccctttatctcatcagagctactattttgatttgagcttttatcaatttcaccaaaataaccatcgtcatcttcactacttgaaggttgattaacagttattttattataattaaatggtgatatatctcttatattcttattattagtattattattattattattataataaggtttaccatatttattaaatttcatatagttaaagttgctatttctgtgtattttattgttaaaagttatcattattatcattattattatatttattgttaatttgaccatgaaccattccattgtccgtaattatttatattattgttacccatatatttattatcattattgttatcattattgttattattattattaaatctattattgttatccctatgttgttcattgctattgtttacattagtgttatttatatttacattattgttatcattataattatagttattatttttattattgtcaatttgattattttcaaaatttggtacgttagttcttttcttttcaacgccaattattctaccagctacttccatattattgaattttaaagatttctcaacgagacttggatccgataattcaatataagcaaaaccttttggtaaaccagtgtatctatcacaaataatagttacacgatttacactatttttaccacaaccttcaatatgatcaataccattacaaaatatttcctttaatttccaaggagaaattttgaatggtaaatttgatacataaattgattgattatcaatatcacgttgatttctcggttgatgagaacctaattctaaattatcaaaatcttcagttatattttgtagagcatttgaagaatctgtaatcgaattcaagtttttatttgtatttgaatttgtatttgtatttgtatcatttgaaatctttttagcatgaggtagtggtattgattcttgggaggtgatactcctattagttgttgatagattattatcatttgaactaaaatccgaattataattttcagtatttgaaatacttgaggagtttgttgaaccattactattaacagtattgctattattgatattactattgctattgttgttattaattgaataattatcagatggaatattcaacttatagttgaaatcattaaagtgattatttaaactcatagtttgactgtttaaaaattatttattgattagtttattatgtgaataaaagctacaagattaaccttatcgattgaatgtatagttatcaaatacagatatagtgattatttatatgatatattaatgaattatatctaatctattttgaaattactgtgaactgcccttaaatgaaggaacttcttgctatccagtggaattgaaacttatagaaaaggaaattctttactctttttctttcctactttttcaacagtaaattaaagttacaatataaaatataaatacagtaataaaactgaaatttattttttgttgtactctacctatttaatagaataagttaactaaatcaacgagaatagccaagtatttaaggtgatgagaagtataaaatgcacaaccaaatcaagaaaacaatcataatacagaaatttcatgagactataattaacatttagggcgggttgtggaagaaaatggaagttattttcaacaaagtttcaaataattccgtcggtaagtcgtatatactataatgctataaattatgataatcttatcgtagctcctttaataaactatagagatctaaatagttctatatcaaaattttagatattagtacataaatctgatgataaggtgtatttatcactagagggggggtgggaatggcataaatagataaaaatttccaataatatggataacctggtattaaatagagtggacagcacacatgaacaacccgacgggaataaaacttccatgacattctttctcttatcgttttaaaactaaatgcaattatgtcatacaatttcttggtattatatcaacaattcctatggatattgagtaatcaacttattgtttctacggatattctatttcatcacaatttaacaggagatatttatacattacctcggtattttatttgcgttacttagacgatgagttaggagggaaaggatctttgggattggtatattatcatttgtgctactaattttacccatcatataatagtctcatcgacctttggaagtcgcgtctattatggctttacatttttcattacgtaataatttttttttcttatgtgttgcagtgaaataattttttttaaacagtgctatactaaagaaatttgatagaaaaaaaaattttattgtaccaaaagaatgaaaaattattttttattgaacttatattatactacatcatattatcaacacattcatttaatagccaataaattataaaataaacaatggtatctgtgaggaagagaaagatgaaccgttctggtgtttctaaaaacagacggaaaaataataataaatcaaaatttaatccaaagagtaatccagttattgcaaaacattgggatccttcattaactgcgaagcaaaactataaaaaattaggtttgacattgcgattaagcgctgcatctggtggtgaagaaaagaaaataaaaatcaaaccaattcatcatggcaatatggaagaaagtttatttgatgatgatgaagaaaaagaggatgaagttaaagaagatgaagaagaattagatccttatgatccagctaatattcttgaaggtactgcaaaatttatgagagatgatgaaggtaaagttattaaaatcatatatggtactaagaagataactaaaattagtgaaaataatgatgatttaaagaatgatgaaaatagtgatgaatctgatgatgaacaatccgatgatgaacaatctgaagctaaacaagtgatagcagaacttgaacaacttgctagtattccaaaaaagaaagaagttattaaaatgaatgaagttgaaatttcaagatatagtaaattaattgcaaaatatggtgaagattatgaaaagatgaaatgggataaaaaattaaatcctttccaattaagtcctggtcaacttcgaaaacaaattaagaagtatcttcaatatcatgctaaccaagagtaatcctgtatactatactaaataaattgacatacttataaatcgataaaatcttgaataataaattattatcgcttacatgtgataatcattttcttttactttgatacatgtacctcttttaatcaatctcctttaacatcgatgtcagaaacaacaagagattctaaactcaattggacaaaacatatagccaatacccctgaacagaacatacagacattctcctctaaaacttcacatatggcaactcttcaatctcggaagtttgaacacattagaacaaagctctataatgatattcatggagtggcgcagttgtccaaaaaagcggctggtgttgtggaaacttctgaaaaattaaaagatttaaacaaagaactagatttctttaaataattagaaattgtgtctataacatgtacacacgtctctttttctatcttcttgctttaaatatatcaaccttttatactctttaaacaaagaattatgctttctagactatcgcttaaaagtaatataagttcttcaattagaaattatacaacaaaatctgctataactccaacaattattgaaaaattaccaaatggaattaaagttgtaattgacccaactccatcatatttttcagctgttggattttatgtaactgccggtagtagatatgaaaaaacttatggattaacaggttgttcacatattttagataaactatcgtataaatcaactgaaaattttacagcaaaggaaatgaatgattcattaaataaattaggtggtaattatatgtgttcatcatcaagagaggcaatgatttatcaagcaagtgttttcaataatgatattgataaaatgtttcatttattaagtgaaactgttacaaagccaaaattaacaaatgatgaaataaatgaacaattattatccgctgaatatgaattaagtgaaatttggactcaaagtgatttacttttacctgaaatcttccaacaagttgcatattcaaattcaaatttaggtaatccattattatgtccaattgataatttaaataaaattagtagaaatgatttaattaaatatagagacattttctataatccagaaaatttagttattgcattttcaggtgttgaagagacaaaggcaatgaaattaattgaaaaatatttaagtgattttaaatctaaaaataatgaaaaaattattaaagagcctgcattatatacaggtggagaattttcattaccaattccaaatggtatggaatatagaggtgaagaatttcataatatttacgttggatttgaaggtttgaatattgaagataaagatatttatagattagcagttttacaaatgttaatgggtagtggaggatcattcagtgcgggtggaccaggtaaaggtatgtattcaagagcatatacaagaattttaaatcaatttggttttattgaaagttgtaaaagttttattcataattatactgatagtggattatttggaatttcactttcatgtgtaccacaagctgatagagttatggcagaaataattgcaagtgaattacgtacattaatgagttatgatattggacaaggtggtatatcagaacaagaattatcaagatcaaaaaatcaattaaagagtagtttaatgatgattttagagagtaaaatggttcaattagaggatatgggtagacaagttcaaatttatgataaaagaattgatgttacagaaatgtgtgaaaagattgatagtgttaatagacatgatataattggtgttgcacatgatattttaggaaggacagaaccaacaattgtcgttcaaggtgatagagaagcctttggtgatattcaaggtatgttaaaaaaatatggtatcgggaaaataactgatgataataaacctagaagtaaaaaatggttttctgcatagatagattataaggagaaaaaagaagaagaaaatttatacatctttgtaaatagttttaaattaatatagtgaataaaataaacttagatattccgaccacgatgttttttgcttttgttttttacttagaaaatattcgatataaatatacaaggaaagtagagtatggtaaagtaatgaaagttatatagactcaaaatgttatctataattcagagaactggagaaaatacatgcaagaggtattgagtgttaaataaacacgactattaatttttcttttcgtagacatcttcttcatgtaaataagtatggaagactctatcccagaacattgaagtaacaccaaaacctaatctataatttttataatgatgttctaaatgatatttctttaatttttgaacgtatgaaggtaaattcttatgatgtaagaaataatgagtacaatcatacatgatataacctaagaaaccacctgcccaaccagcacaagcaagataaaatgggaaaattccaaaaatcaacttatagaatgggaaagctaagacgataaataatgttggtggcataaccaatcttaatctatccattggtaaataatgatgaacgccatgcattaggaaatgtaaggtaaatgcaatattattttcaggtaaattatcatctaaatggaataagaatctatgcatacaatattcaattaatgtccaaacaaataaacctaaacaccaaaataagagagtaacgacgggatgtaaatgagatgcaccaatataaagaatgtaaaaatcaagaggtaaccaaacagatggaacaacccaccatggagttaatgataatggttcaaggaaattaccaaataattgagctgaacctttaccataatgtcttggtctatgaatttgatcaatatagaaatctctagtccaatttgcacgtaaaacttgcataataagaggtttatctaaatctaagaatttatgtttcttataatcatcactatgatctgttttcaaatgtaataaatcatctggaatatcaccaaaactagttagatcagcaactcttaaaccatctgaatcatattcaggttttaatttgatatctttatgttttgttaataattcttcttcctcttcaggtgttgctaaataaccgactaacatatcatcatctaacatttcataagcactttcggaatgaatgtgagaatcagggcttgcaagaatttcagtaatatctttacctgcataatccataataagttcaggacctgcaggatgttcctctaagaatgacgtgacatcgtaaactttacgattatagagagtaacccaaactgatttttcagtgttgtgagactcaacggtagatttggcaaataatgggagggatgacattgcctttatgatttaagtagaataagtagatgaaaggaaagtaaaagaaacaaagttagaataatgttagagactatataaaaagggaagacacggtataaataaatataatacgcttaattgtcacccaacagagcttatataataataaaaataatcattaataataataacaaacagaatcaatctcgttccctctctctttatattagctgattttcaattttttcactataaaattttcacctgtttaaaagaaaaggaaattttcgtttctttttcccgcgtttttttatgagtgttgatctttttttttggaatgtatctggtcactttgtggtacatgcatgcgtcttttatggggttgcgcttctgagaccttctagcacgattctccatccatggcgcatacaacaccagtttgcatgttccccttcaaggtcaatcccatcatcatcaggatcagtctcgtcaaattcagttaattcctcactggctggtatctctgctctatgtggacatggtgggagttcctcaactccatgtacgtcgcctggatcatcgtctgaatctgatgaggtattgagaagaattctacgtgtacatccctcacatttcaaaagtagaaatctagtctggtggaatttttgtaactttaaatcccatcctaataacgctggtaaaattacatcaatattgggaaaaatacgcatatctgtacttaatgtctcgttaccatctatatcaatatcaatatcaatgttcatatcttcatcagttgtaatgttttgtaaatattgtaatagaaatgtcttttcatctttactcaaaaattgtgttttaaaattacgtccaatcaatttatgtctatgtttccttaaaatatccaaccttccttgaaatttaatcaattctcttgacatatcctttggtgacaaataatagttctcatcctttggagttaatggtaataatggtaaaaatgtacacgttggataatgatctgttgataatctcgttacatatgaattaacaagcgtttcataaacatgtatatcatcatcctcttcttcatcatcatccaattcatcatctaaaaatcgatattcaaattgtaattcatatttatcgttattattagcaaagatttcgttataataatgatcatcatcatgatgattattgaagagttttttagttgaattttctctaacattttcatcatattcctttaattcgggtaatttaactattatacctgaatgacatgatgtacaatgaagttcattcttcctcactgggtgacatttccatccctgtgtagcacatattaatggcgttaatttactattttcaatagtccaattgaaaactgaaaaactattgattcttttaatcaaattacttctcgataatggtgacggtatgtatctaactgttggtattttattaggtcctctaagataaaccaattgttttttatgctttaaatcattattattaatattattatcactgttgccattattgaaaccatcaaatgatgatgacgatgatgataatcttcttttggggattatagatttaggtaatgaatggaaatgctgtaatggtggtttattactctgtgatatcgaaatttgctgtagaatattaagtattgcactagctgttgaagatactgcctcttcatctatgttaacatgatcatctaccattgtatcattattgtatgacatttgaacgggtgtaagatgttgaaacagatcaataaataaaatatacggtacaataatattatagaaaatgacccacagattattaaataaaacttgatgcatcaagatttttttttatgagtctttcaacaaattctcttaactttaatattttttttcttttaacttcgtatctttctgtttccttttggagttccctataatagcaaaacatgagttacaaagaaaacttccttcaagctgcattagatgctgaagctcttaaatttggtacttttacccttaaaagtggtagaatctcaccatatttctttaacatgggtttattcaatactgctaaaactttaagtactttagctgaagcttatgctcgtgctatcattgattcaggtcttgaatttgatatcttgtttggtcctgcatataaaggtattccattagctgctattacagttaccaaattatatgaaattggtggtgaaaaatattcaaatattggttattcttttaatagaaaggaaaagaaagatcatggtgaaggtggttcaattgttggttgtgcattaaaggataaaaaaatattaattattgatgatgttatgactgcaggtactgctattaatgaagcttttggtatcatttctgctgaaggtggtaataccgttgcttgtattattgcacttgatagaatggaaactactaatgattcaaatgaatgtgcaactaaaattgtttcaaagagatataatgttcctgttctttcaatcgtctcattcgatgatatagttgaagtcttaaaagagaaattaacatctgagcaaatgaacagtattatggaatacagaaaacagtatgttccttcaaactaatcctttgaatagagtatttactttgattatttaatataatattacaattactacaatacaatttatgtttcctttaaaattttttattagtatatttcttacggttataaaattacatgaacaaattccccttaaacctaacctctaattctttggattttttgcttaatcttcttgggttcaataggtttttcatttgtctcatttggtgtttttatatatgcacctgcagtttctggattcttcattgtaaggaaggaatgcataggaacaatagtgttcattctgaaacctttgactttaggaattttagttggttcccaattaccttccattaattctggtggacctggtaaatctttaacattctttaatgtagttgggtttttctttaaatattcagcaatagccatcaatgcttcatgtttagattttaacattggatgagttgatttaccttcatattttatacccaatctaactctacctggattaccccaatcttgtggatgtgtcttttctggttcaaaaactgctggaattcttaataatttacatgcatctaatatagtctttgctaatggattttcaacacattctgatttaggtaaccttcttccttctttcgtacttctattcttatcaaaataacatgggtacactatttgcattgccttaaactctttacgttgttctggggtcatactatcatacattgtcatatttggattttgagcttttctctctgcatttgcttgtgctgccttttcagccatctttttaaaatccatatccatacccatacctttgaacatatcagcagctggaaataatggtggttctgaatcttgtgatctggtaacttgaggtttaggttttgctggtgcaacaggtgtgactaaatctggatcaaattcagctaaatccatatcaaaattgtcgatatcctccacatcctctatttcttctagctttggcatcttggagtgtattatctattagttaaataaaataaattgtaaactaataaatacaaaaccaaatcgtcgacagtactgaagaaatgtacgaaattgaaatttaccagttccaacactttttgatgcgactatctcaaatttcatgtcaatcttttttttcttcttctttctgttatagaaatcttttttttttgaatttttttatctagtttttaaggtcatactggtaattcaagattaacatattgagtggtattttgattaggtataatgaacaattatgaagaaccagatcgaaatcatatagaagacaaaccggaaaaacacgacattactagaagaacttcacgtagaagaacgaaaccagtagattatactgaatactttaagtatgctgaacatattcctgatgatgagtcagatattatagatgaaaatgatgttgatgaggtggataattcagatgaatctgaaagtgtaacgggaagtgatagtgatattgaaattacagcagtaaaacacacgaaaaaggttgtaaaacgtgaatctcctaaacatatgagaactgatgtgttgggatggaataataatcttttagaaaatgacagtttaaatatggaacagatatataaaaagtatttgtccaatttcgatcaaaagttgttacctttacagcagcatcaaaaactgacaaaggattttcaacattattccgacttactgatagatataaatacggaatttaccaaagacttaccattacatttatacactgcacatcttttgtcaactaaaaatcttcatttaccaccaaaagattttacgtcgtggccatctccaagttcgaaactgataccacctcggtcatacttaagtaccacagactttcaatctttaaatattttacccagcagagatttcgaaatgataaataattccaaatatgtaaatattgattacaggcctaattatggtcctaaattacgtgttcccactcactccatgttggaatattggcatccgcagataaattcaggtgaggaaatacgacaatgcattgactctttatatgagaagaaaattaacacccaaatacagcaatactctgaatctaagaaaatcagaaaaaatggtaaactatcaaaatatacatatcaacgtagggttccagaagatttacatttagatgataaactaaaggataaaattgttgagagactagatgaagttattgataaattaatatccatcaatacagaaaaggttgaaaaattggaaaacaataaaaaaccaggagtagattatacaacgtttaatattgattggttatccgtgatgtcatcccttggtactaacgaatacaataaaaagatgaaaacatttttattgaaattattcaatttgaaattagaaaaagataattttaatgggccattacaaaacattttggtaagatcacaacagtttactgaatcaagaaaccttagaaacaaagttttaaaaagagcaatcactacaacacaaaagaaaaatagcaaatcaagtgggtttaaagagtcccttaaagttttcaaacaaagcaaaaaacaaaagtcaaacatacgcaatcatttagatgattttatgaagctaagtattgtacctttcaaatacgatgactataattcctaattatacatcaaataaatatatacccaatttatagatttcatagataagcatgcatctttaatctgcaatttcaggaaatagtgaaacaaatatttcatcaagtattgataaaactaaatggcaatttaatatttcattttgtaagcacatatacaacgtatcagcagcatcagaactagctgcttgaccaaaaattttagatgtagtatcaataatgtaatcatgtaaaagtttattagcttcttgatttgtaaggtgtttctcgtgtaaagttctaggttttctgcttttacgaaagtttccatcaggccataaggtaagttgtaaacttgtaagtattgtagaaacagtttcttcatttctcaatttaccatcaatatttgatcttataatcttttcagctgtggaaccaaacacttgttggaataaaagaactaaagcttttcctctgatccaactagctgagctatttaaatggaacacggtaactatcaaactgcaaatgggtttaataaatgacatgtctctcaatttcaaacttgctttttcactttcatctgttatttgaattgtttgatctgcatcttcttcattattctcatcatcaatctttttggatgaattatactctggtgttgattctctcaaattagagagtgataagagtgggtataatgcttgagtggagataagattatatagttttgttccagaaacatcaatttcatcattgttgctattattgtatgtaatgtcaaaatgttcacttgataaaaattctctaaatactctatctgagcaaactttcttactttgaatcaattgttgaatataaatttctaacttttttcttctttcttccacaatggtaccttgaatgaacttgatgacaatattcttttttgggaactctaactcagatacttcaggataagtggatttcaaataattatgcaaatcatagaattgagtgaaccttctggttaccatccaagttgttgcaggattcttatttgaagatttttctacattaataacataaactacgtaacttttcccattttcatctttagatgaaatacactctggtattgtaacagaagaattggagtataaactattttcactatcttggacaatatattgttctttcctcaatgttttcaattttatctctttttctaaacttaaaagtgactttcgtaaaatacgagattcaggaatattattgataacttctgccttcttcaacaaagttttaataattagtttttgtttttctaatcgtttcagttcggaatcaagtctctcgatttcacaggatatattttgaacatcaaatgatgattttctatcatcattttcaatgctatattctgataagctagaatctgtgtcgtcatcaattgaggtagctttgaaaacgtcaaacttgccagttaaatcaatttcttctcccacttcattaacttttgcggtatcttcttcgttttttagatcatcatccgctgttccaaatagatcttttgcaagatcttcactgattagtctagagtttcttttatctgttagatcatttaattttttcacttcctgcgcctttatatcttcattcataatctcgttaagtgcatcttcaactgctttgacaaccgtatcactaattttacctgtagtattcacatcaatataattctttccatcttcattatcatcataagtagataaaggatcttcagctgagggatcgaaattcttttgtttagttttttctgtttttgctgatgaagctatatccggcactacaccagcaatagtttcagtgttcagatatgttttacttttccgtagtaacatttcttcaactagtaattctatccataaatttgatgctttaaatgcaataaaatcactctttttcattcttgcaaattcaaagtcttggagttttaaaatgcattttttagcacgtgaataaccagtctggctggtacaatttccttctataaattcactaactttgtaatacaattttggtggtattttcattactggattatcaaagtatttttcaaaaatttgtttaatttcatctgatcgatttggctgtaatccagaaaatgaatcgtttgcatcttcaacttcttcgtcatctgtcttcacaagatcaatatcgtcttcaatttcatcatcgctgttttggttaacgctatatctttttttcaagtctaaaggatttctcaaactttcagcagcaatccaaaaatctaaaagagttttacgatcatctctttgttgcatataaacctgaaaatactccagtcttaatgctgatgataaaacctcagtgaatgaatgatcaatcatatctcctttaatatcttcttcctctgatatcaatggaaacgttgattgttttctagtcttcacttttgaaaattcactattgtttaactttgaattgattttcttaatgacggcattacaacgtttggaatacgaagtaaaaggtttcgaatcttcggttaataggtttgggtacactttagctattcgttcatttcgaaacaataagtgatatttaaatctcaataggtcattttcattttgtgacttctctatagcctctaaaatcatggcatattcttgcttagttgtcttcattgtaagttccaaacctaaaagattgttgtcacctttattatttgctaaagcagagctagaagagtttagggagtgtctatgtaatatatttcgaagtttcttcacctcatttctttccttcatttgtttggatataaaattgactatcatttgattataataatcgctatctgataacattgagcagataggactcaacacaaatgatgaaacaagttctcgtacaagtatacgagctggatttgatttgcattcattatcctctaataaataaggtaatattttgtcaatcaattcacttagatatatgttaatattttctaacggctcttctgatttttttttgattcctttgtgtaaatgtcctctattataatttgaggctaaaagatagttgttacctagtttattcgtatttcctgttaatttggtactcctaattatttcatgagcggtaattatcttatctatgtgatcattaatcaatggtattaatctatgaactaataagttcgatatatcgagtccaacaactctactttctaaagtcctgaaaatgaatctaaattcatgtttgatagaaagcaaaaatgatttattgctgcttatctttttaaaccaagactcaacaaaatcacgtaatattaaatcaattatattgtttacagtatcgttaatgacaaaattatcagggtataactgtctatcttcattttcatgcaataatttatcattgaatgattcaagtctttcaggccaatttttgtttctatagaaagagtatttctgtcctctttccttgagatatgctaattcatcaaaagaatctagttgaaaatatacacttatcaaaagtatcaataatgtaaataagaaaaagattccggctaatatgaagactggtttgaacaatttgatataaattggaacaacaaaaagtaatattcctatcccaatcgcaaacttttgaagcatgtgtgtagaaaaggttcctcctaagttatatacaatgggttattgttttttaaaaggaacaagaacaactagatcttttgaataaatgggatgtatcccaggtttcaatagaccgcgtttcgaaattcatgtcaaccgttaaaagttgatctatcacaagttataattcttctagaaattacaaaaaaatttacttgtaggatatatataaggttcatgatatattatgcagttaacaaatgttaaagataacacagacaaagttagaaaaatagtaaaaatagtaaaaaaaagtaaaataaacgttgaattcaagacttagctggtctcctcttcttcattttctttatttctttgaataacagctttcctgatcttgtcactcaatgaattggcatttacaccagtagataatgaatcagcagttattggaatatgttcaacactagaagagttagatgcggtagctgtatcgggcatttgaagttgatctggaaaaatagaaacatgagctaagtttggtaacttaccattatcattttcaccatcgaaattagaaaatcctgagtagtttgaacttgatctactcaatggtggaagagagtttggtcttgatgttgatctggatctagaacttgatcttgatctggatctggattcaatttcttctttttcagcttcaacttgttcggacagtttatgaatgtgaacttcattgaatttcttgaaaaccttaggacctaattcattaataacttcagtaacttcaatagaaagttttttacgttcctcctttaattcatttaattgcttagatgatgaatgtaaggacagtaaaaggggatcgatagatttgtaaatatccatgccaacttctcccatcttcaatgcagaataagtagtaccaactaatagagcccatgttccacagaaaataacaaatagtccaataactgaattgcttaatgaagggaacagtgagtaacgataaacaatataaagacctaaagttgaatatgtgaaataacaaacaggtgcaaagaataatgcaataagaactttccaagaagctaaaacatcagttgcattaatcttaacaacagatttagcaagcgctaatttttgtttcttttttgaaatgacagaacaaacaataaaaataggtgcaaataaaatggtacctggtaaacttaaaattgagtaaaaagtcaaagagacaactctgtttaaaagcaagcataatgtttttaatttgttatcagttgcagtttcaagttgatgatctttaataccaaaagttcttaatttcttattatatgcaaggacagattctttcaaatgtataattcttggatcagctttaaatttactataaccagttaacagatttctattcatttcaacaacaacaggtaaaggtggacgtttgaaacgaccgtaagagtataatcttctagcagcttgaatgacttgtaaagtttgataagtctggagcttgagttgtaacaaaattcatagcatcgataatttctttcattaatttattaactgcctttcttgaatcttgtttatattcttcacctctttccttagtcaaaacaattggattaccatattcaacaacagctcttgatctaaacttatgaggatggaaatagtttaacccacatggaacaattgtaacttcggtatcaggatacttagcacttgcacctaatgccattaatgcaaccccgggtttaaattccattaattcgggacgatcatgtgaaccaccttctggtgcaataccaatacatttaccgtcgtgtaatgcatcaaaaactttatcaaataattcatgattatcaattcttggagcaactgaatatttggtgcctttaataagagcatcaatacctctttgctttttcattgaagttgctaatctaagttttgtatcactaataatttcaccaattttaacattaccaccattatttggtatacctattagccctttactaacagcaatctttagtgaaaatgggtatttgtaccaattaattgtaagttcatcctctggataattttcaaatttaatagttccctctttagattgcagtaaatcttgaggtctttcaactggtatagcaccagaccatctactccaaatacccatccatttactgtaatatgatgaggcagcctcaatcataaagatctgtctattagtcacggtatgagcagcatgaattgaaattgcagcatctaaatattgatttgcatggggtgcaatgaccaccattgtaggacctgttgctgggaaattaaaggaccctctaacagaaacttctctgaaaaagatatcaataatgatctggagaaaccagtcaagcatctcaagtacaagattcgccatctctacctagtgtatgttgtaaaaataagtatattcactacagatattgaggtaaactgtcactaaaccgttgccataataaacttaaccgagtggatcgataaaaaataaatttcaagaaaaatcaacttctccatgaaattaatttatttttccaatttttcaaattttctctctgaggtgacccaatgatgttaatactggcaatttcactttcaaccctttcactgagtcgatatttccatttatcttctctttattggttaaatataccctctttcagttaataatatgcgtttacgatatatggattggtctcatacgctttgcttgatcatactgctcaatcttttggggttctcagtttcaatagactctcaatctgcgcaggtcattacaaacaatttttcggaagatagtaatagtgatataaagagaaataaagaactagttgttaaaaatgcctatgactataatattgaaggtactgatgtattgagtaatcattttggtgctgcatatccgaatttaaatgatgtatcatttaatggacctaataaccaactaaaagatttccaaattacaaatcttatattaacctcagatatagaaggaaatatcaatgcagttaatcgacgaactggggaattattatggtccttggttggtggtcaaccgttggtggatgtacagtccgaaaagaaattgaaaacttatccatcacctacacctgtaggatcatattcggtgaacacatcaagtgctgggaaaatatttgaaaataataacataaatgtatataccagtgatgataaagtaacaaataatggtagagcttcaacaaggaaaaataactttaaaaatgaaattacttggatagtagaaccgtttaatgatggtgcagtgtatcatttcactggtaatgaaggattagaaaaattgccattatcagttaaagaattcgttctgaattcaccattttcagtcaatgatcaatttgtttatactggtactagaatgtcaggtattgtgaaagttgatgcttataccggtgaaattgtagagacatatggattggatgatgtaggtgtttgtccagctgatggagaattttatgaagatattcatgatgatgagaacacaaatgataatgaaatagaacttaatacaatagatcataaaattgaacaatcaaatagaaagaatggatcagtgataactttaggtaaaactatctatgatctcacgattcattcaaaaaacaatacatcctggaatataacttatgttcaatggggaccaaataatttgcattcaaatttgttgccacaaaattgtgattcaattgatgatatttatatacagccatatcatgataacacattattagctttagatattaacaccaaatcaatcaaatgggtttccaatttaccatttgtaactatcaatgtttttgatgtatttttaaatccattaagtgaatctaatgattatattattttacctcatcctctagataaacaagataactcgccccctaaaacaaatgaggctacatatttagatagaaccaaatcaggttcatggtatgcaatgagtgaaaatcattatccttcgcttgttagaagtgcaccattggctaaatatatcaccaatgaaagatggagaatgccatcaatttttgcaaatgaagatttattagaaatttcaatatctggtgttcatgataattcattgaaaaaagattccaatgaacgtaataaaaagaaattagcaaattcaaacacagtagaaaattatttggctgtatatcaatcagctacacctgtgccagtttatggatataatggtgataaaatgcaaaaagttccacattatcttagtaataatattaataataatgatatcaacgggtatgacaattacatgtatcatcaacatctgcaaaatcaacaacgagttctagaaattggaacaaattcacccacgatgacatttaataaatcctcattcacgaatattctatttagagcatttgaaaacgtttttgttgcactgatatgtttgggtgttttctatgtattgtctaaactaggtgttctatcatcaatagggataacccagaaaaatgtgcaagaaaacgaatatatatcatctgaaaaacaaattattatcgaaacaaacacggatgaaccaaattcttcaactaataatgaatctattatcagctcagctatatcagatattgaagacccaaataatataccccataataaagataacagtaatgacacaaaaaaagatacaaaattggaaaatcaagttgacaatcataatttaaatagtgaacttgatattgataatgatgaacttggcaaaagaaaacgtaaaagaggaactcgtggtggtaaaaagaataagaagaaagatttggaaatggcatcaactaataaaaccgcaaattctgatagtaacctattgactatgcaaaaccatacggaaaatgaacttgatgcttattctgattccgctgttgttacaattaacaaaaaatatgatgatgaacacattactgaaatcagtaataatttggtaattacagatagtattttaggttttggatctcatggtactattgtattcaagggatattttgaaaatagaccagttgctgtcaagagaatgcttcttgaattctatgatgttgcatcacttgagatacatttattacaagaaagtgatgatcactccaatgttgttagatatttttgctcgcaggaaaagaacaaatttttgtacattgctttggagttatgctctgcatctttaggagatataattgaaaacaaaaaagatattggtgtcaaaagtgaagataaagaaattttatatcaaatttccaatggtgttgatcatttacattccttgaatattgttcatagagatattaaacctcaaaatattttagttgctgtctctaaaaagaattctaaatcagcaagcaatgatgttagatatttaatttcggattttggactttgtaaaaaattagatgcagaccaatcatcattcaaaggaacaactgccaatgctgctggaacatctggttggcgtgcgccggaattactcaatgatttatcaccagcttatatgaaacaaaatgttaaaaatagagtcagattaaccaaatctgttgatattttttcaactggttgtgtatttttctatgttttaactaaaggttatcatcctttcggtgataggtacataagagaaggtaacatcatcaaaaatgaatatgatctttcaaaactcaatcaattaaaggattcttatttaattaaagatttaataagcagcatgattcaaaagaacccgatgataagacctgatataggtacagtgataaaacatccgtttttctggagtgcagagaagaagttggaatttctactaaaagtttcggacaggtttgaagttgaaagaagagatccgccttcaccattacttttgaaattagaatccatttcaaaggaagttttaggtagtgatggttggtttgataaatttgatgataattttattgataatcttggtaagtataggaaatacaatacccataaactgatggatttattgagagctatcagaaataaatatcatcattaccaagacttgccaaaagacctagcaatggagatgggacaaattcctgacgatttttactattatttttcggataaatttccaagaatgttacttttggtttacaagttggtgcaaaaaatactccacgaggatgaactgctggttcagtttttctaatgttattgataacgtactatctagatcacttttaaatgaatttttatattttttatagatgaaatactcagtctcaccttggatagactagtgggatgatttagactattattgtagagacgattggatcttatgtgtcagccatgggggataggaaaagggattgataaattaatttgatggatagtactttatctcgcttatcgatcatttttgatttataatttaaagggagtaatttccctgtcaacttagcaaccataaattattttgctttttaagaggcgttaaactgcatttttctgtaatccaaggcattcttttaaattgtaatagatacaatgcctattggacaaaagggtaaggaagaaaaacgtctggttgaggacaaagagagaactaagtactggaaaaaatggggaacctatgtttctgaaagaacctggggtgttccgagagaagattatactgatgaaggtgatgcttggcaatttgattttgaaactgctaaaagtagagtttttcgttggaatgaacaaggtatggctggaatttgtgattcacatcaattgttcaatctcacaatggcgttgtggaatgaaaatgatgatattttaaaagagaatttatttggtttaccaggtggtgcttccggtaaaagtggtaatcatggtgaagatgttaaggaattgtactattatttagataatactccaactcattcatatgctaagttcctttacaaatatcctatttcaaagttcccatacgataagttatatgaagaaaactcaaaaagaactaaacatgataccgaatatgaaattacagatactggtgttttcaacaataacaattatttcgatgttttctttgaaatggcaaaggacgaagatgaccctgaagagttatattttagaatcacagcttataatagatcaaatgcgtcagcaccactccacattattccacaactatttttcagaaatacttggtcttggaatttagaatctgaacttgataacgaaaagcctcaattatatcaagaaactgataatgttattagaatgaatcattacaaattaggtgaaagaagaattgtttttgcaccatctcctggtttcgaaggctcaactgatgacattgaacctaagtttttattctgtgataacgaaacaaactttaaagcattatatgacattgagaataaaactgattattgtaaagacggtttccattctcatattgttgatgaagttgaagatgctgttaatccagaaaaaaggggtacgaaagcatgcgcatggtatgtttttgacgataatggtggtgttcctccaggtgattatgtaactattcgttacaaattgactaaagatttgtctgataagagtttgtatcttgatgaagaattacttgatgatactatcaaatctcgtatcaatgaagctgatgaattttactggaatgtttctccattacctattcctcaacatttaagaaatgttcaaagacaagcatttgcaggtttattatggaccaaacaattttatcatttcattcatgattattggtataagggtgatccagattctgatttaccaccaactattggtagagctaatgaaagaaacaaggaatggaagaatttgtacaatgaaaacattttatctatgcctgataattttgaatatccattttattgctcatgggatactgcattccatactattcccctagctatgattgatcctgaatttgcaaaaaatcaattagatttattaactagagaatggtatatgtcacctcagggacaaattccagcttatgaatggaatttctctgatactaatccacctgttcaagcttgggcagcatatagaacttataaaattgagaaaaagaattggggtaccgcagatagatcatttttagaaagagtattccaaaaattattattaaacttcacatggtgggttaatagaaaagatgttgacggaaatggtatttttgagggaggatttttaggtcttgataatattagtatttttaatagatctgagccgccagctggtcttcaattattacagtcagatgcatctggttggattgcatggtattctctgacaatgatgaatattgcattagaattggcaaaggaaaattcagtttatgaagatgttgcttccaaattttttgaacattacctattaattgctgatgctatgacctttttaaataagaaggaaaagaatgcaagaccaactgctgattctttatgggatgatgaagaacaatttttctatgataaaattcaatggggtgatgataatatgagttccgttaaagttagatcattagttggtttgatccctttatttgcaaccacaactttagagccagatgttttggatagatttccttcatttaagaaaagattattatggcttgttaaaaacaagaattatttgtttaagaggcatattgcatcaatggatcataaaggtgatggtgatagactgttattagcattagtcaataaggaaagattaactgcaattttacaaaaattatttgatgagtctgaatttttatcagactatggtattagatcactttctaaatatcatgaagatcatccagttcatatgaatattaatggtgaaaattatggtgtttcttacctttcaggtgaatctgattccggtatgtttgggggaaattccaattggagaggaccaatttggtttccaatgaactttttattaattgaatcattattaagattttacttgtattatggatcatcattaaaagttgaagctcctattggaagtggtgaatttttaaatttgggacaagcagctgaagaactccaacaaagattaattcatatttttatgcctggtaaggatggttacaaagcatatttgggcacacctgttgataattctgaaaatgaagatagtattgagttaagtgaagagcaagttcaatataataattcattagaaatgttaaataaggatgaacatttcaaggacttgatgaatttctacgaatactttgatggtgatacaggtaggggtctgggtgctaaatggcaatgtggttggactgcattagttgctagaatgattcaagatgttggtgttatttgtagagaaccaaattcacctgttagaaggaaatcattttatgataagaatgaaattcagagttatgaaccaaaagcatcagcttatccatttttaggtcgtagaaaatcaggtaaatcgttattgaatttagcagcagaaaaattagagcttgatgatgatgagacagcaattcatcaaccccctggattgagcagacgttcatctgttaaaaccatgcaatctgaaggttccatgaatgaagatttcctgaagaatgttagggaagcaatgtctaaatatcaaatttcagatgatgttaatcttaacaaggaggaatatgaaaccaactagattgttatcttttctttctttccttttctttatctttacttaaaatgttttttactaatagtttatttataatcacaatcataaaattaaatataatcgaaaaaagaaggggtaattatgtaagacatagtgtagtataaacgtatcccaaataggttttaaaaaagctaacaaaaaatagtgaaagatgtgtgtagattatagaagagtatgtaatatcagcctgcaattttgctgtagataacaagaaagattaatagaactaaaacaacaattataccataagttatcagtttattagttgcaagtcttcttgtcattgttttcaaagttttcaatgatctatcaacataggtatcagcttcacttaaagtatctcttgcattcaagatttgatctcgttgagatcttaaattatttaaaattgaactaccaacagattcagattcaattgcagttctagttgcttcatttaatctttgagacgaacgttcaattgaagcatttgtatttaataatttttgtctttgattgaaaccttcattggtttctgatgaattatttccattaaataattgacgtctatccttatcatccattaaattttttaaatttttctttaatttatctaaatcactacgatatgtacgtaattttgaattatacattgctctttcatgagttgcaatttgttgaatttccaaactcattgaatcaaccaaatcatgacaatcgtcaattaatgattcgattgccttcatgaggtcaactctacgagtaacattttctagtccgtatacttcatcaagttttgattgtgcatctgtataagccagattgaagtcagtttcataattttcaaataagtcagacatgttgctgattggtttgataagataaagaagaaaggcaattaaaataaaaaataaacactaaaattactggaatcatcatgttgtaaatgattaacgaggttctttttcacgattttcagatatacattaatgatttatctctacacaattacaggtttatattgcattatctacttataatgtatccataatattatactaggtatgtgttaccggtgaattgactacttatggaagtgtataatacacctatgactatgataatcggtgataaaaggacataaatgctttgagaagacagcgagttagagagcgtttattaataataaatggaaggaaaatgcttgaaaaatccgagagcggagactattttatattggattttgaaataatttattgaatataagttgcttaggtttcattctttttatcttttcattttatcaacaggaaattatgttcagaactatagctaaggttggaacgaggtctttacaaagaaatactttgtcatttcaacaaagaacttttggtgtctctccaataacttttcatggtcatttgaaaaaaccaaatcctggtgaagaacttcatataacttttataacaaaggaaggtgatcaaaagacttttgaagtagctgaaggtgataatatattggatattgcacaagctaatcatttagatatggaaggtgcatgtggtggttcatgtgcttgttcaacttgtcatattatcgttgatcctgaatattatgataaaattcctgaacctgatgatgatgaaaatgatatgttagatttagcatttggtttaaccgaaacttctagattaggttgtcaagttgttatgtctaaagaacttgatggtattagagtcgcattacctgtactaactcgtaatttcatgaataaggatatgaattaaaataaggggaagattatattgatgaaaaaagagagatgaagatgaagtaattagatatatctttatccgacctaattaatcaataaatcatgtaaagtatcataattatacagaaaaattaagcttaatatcattcgaactgagaaatgattataaagtggcattacttttatgtaaatcttgtttaaagttaaatatgttagatttttcaattttattttaaataatgtaacaaaaaattatatatttataattatacaatatacaatttcataaagatatatatttggaatgaatactgttacttagataagcttaatcatcattttaaggattcaatctgattatttaattcagtaagttcattcttcttagattgtaaaaatatttctaattgagtcacttgtgattgaatagcttcaatgttattaattactgaattcaaactgcttcccccaccaactttattagatgcttgtttgacttgttcttccttatattttgataattgttcaaattcatatttaatcaaatccagtttattatctttccccttattgttcttttcatcctcagcttttttcagaagtttttcaagatcttctaattctcttcttaatttaacttcttcccaatcagttccttctgtttcagtaaaatctgttccattagaaactaaagaattggaatttgaacctaatttatttaaataatcggatgcaaatgattgtttagcttcaggtactttacttggttcaggtatatttatatcagcttgatgagatgatggatcatattcaggtatttctttagaaaatgttgctcttaatgatggtgggattgatcttggaactcttttaccatttgatctttgatttaaaatatgtaaaaacaccagacattgatccttatcaatagttttagattgttttggattaactatattccatgcatatgttatatctgttactggtacttttggtaaactcttatataatccatctaatgaattatatgttattctaccatatgtatcacatgatgcgttatagacatcttcatatgaagttttatcagttggtgatatgtaccaatcaaaatcagaacttaaagtatattcatcatctgtatcactttcaccgccaacattatttaccttagaggacactgcgttatctgcttcaattaaatgacgttttgaacctggaattaaccaatctggtaatttagttggtacacttgatgtattaccattgactaaatcaaagattagtctcattgcaatacagaattcttcaaaatctagtttaccatcaacatctatgtcagctaagtcccatatctttgttaacttatcttgttcaagcctggaatttttgaaaacaggggctagcttttcacctgttaatttcttatcatcaggttttagccctctaaatatttcccagtacttctttatctcccattgttctaactttggcatgttttaagtgtatataattggaattgtcgttgatataatgacaaaacaactatccaaaagctaatttatactccaagtgtattgtgcatgcatcacttcacacacagtttttgtaattgttgcgaggttccactatgaaaatatcaactttatcaaagaacagcaactgaattcgcttttcagactacttattcactcatctatcaatgagcctagataatatacatcagattactctacttgttcagatcctctacattgattaacttttcagtactctaactgtgtgatttaaactcaatgcaatgttaatgaaaaaaaggttaaaaaaacaatatgagaacctaacaagtagcaagcaaaaaaattgatccctagcaggatcgaactgctgatcttggcgttattagcaccacgccttaaccaactgggccaagggatcatttgttaagttttttaaaatacacttatttctcatattgtattttggcttacgtaatcaccgcaaatagtttattttattattctatttaagtaatgtgttttttactagtaattactttttttctattataaaaggaatgcctttaaaaaataataactgttttttcaacacaaatttatttggtttttagtaataaccatatgtagcaaaaaaattttaaaaaatacattttgctttggatatttttaaaaaaaattaacaaatttttaaaaaaaactagtttttatgcaaaaagattagtaacactacaaataattaaccaaaattaccacaaaactataaaataggataatatgtaatatctaaagtacataataaaaagtttttacaaatttttaatattcaaccccaacaaaattctaccaatttatccatccttacgtttttatttgccatctttactaaccatgggtgttcaagcatttgtctaggagatggacgttgtctaccttcctttgtaagacaaaccttaataaaatctttaaatccttttgaccatttaataccttcctcaggctcatcttctagtattggttcaaattcaagtatcattattaataattctaatggacttatttgtaaatctggtgaactttctctgataaatgggaattcacccaatgccccctcaagcactgttaatccaactgaccatacatcacaactaatagtatatggttcattcttaattctttcaggagccatataaaatgatgtaccaatataagtagaagctaaagaattcacgacatcacctgaaacaccaaaatcacataatttaacatctccattagaatttagtaaaatattttgaggtttgatatctctatgcataactttactttcatttaaatatgctaaacctttcaatacactacaggcaatttttcctagaggtttttcacttaatcttccatcacgttctttgaatgccttatagatagcatccaatgatctaccgcccatatattccatacaaatatgaatcgatgaacttgattcatctaaaaatgtaccgtaatatttaacaatatattgagaattaaatttcctattgtaatttagttctctaaccatttgtttttggaattctggagtaggatcagttgttattattttcaatgcaaatattgtaggatttttagttaaagtttgacattttttgactgacccaccattaccttcgcctagaatatcaacagtcttgattagttgtttttcatgtaagattttccaatcagtctctgttaaatcgtcaatacctttgtccaacaacatcctcatactctcttcataagctttattttcattttcattttcattttcattctcgttgttactgttatttttgatgctttcgtcagttggggtattattattgtaagaatctgacaagttacacactacgtcatcattttcatcaagttttaaagtattattgaatgatgaaatcaaactagaagttttggcagataaaggattatcatcattaagagttgaaaaagaggaagtagtcaatgtagtagctgcgctgggtaaactattacctacttcagctgttaatacattcagatttggattggagttagttgataacataggaacgaccacattagtttgagaattgtcagataaattcaaagataatgattcatttggctgtgtagatttattcttgaattgtttaggcattggtggtagttttggcaagtttgtagcgttgaagatatttagtgatggtgccggttgttccataggaatgtccatattcaatttaggtgcaggtttctttctctctcccctagagaaacgtagtctcggaagattggtacttgtattaattgagccatcattggcatgtatatctgatcctagcagccatttgtacttctgtaaatacacagatcaaaaatagaaaacacttcaaaagagaatcaacctttgaaattataatgaaaatttaaatagtctcttgaaggatttcagtacagcaaattgtgagataaaaagcttgctttaattaactaccctgttctttcatttatagctgtacaagacaacaatcatcatgtccaactttaatcctaacttactgccatactttaatcctcaagtggaacgtcgggtttgtttaataacaggtggtaatagtgggttgggatattacactgttttacatctctatcttcatggttacgatgtttatctcgcaggacgaaacaagcaaagagtcttacacgcaatcgactcattgaacaaagaagctgttgctcgtaggtctaaatattcccaatctcaattaaagaaacgatatttaggaactttacattatattcaaatagatttgctatcactaaactcagttgaagaagccgccattgagtttaaaaaacgtgaaaaggtacttcatttacttattcttaatgctggtataatggcaacaccatatagtaaaactgctgatggatttgaaattcaattacaaactagttacatatctcatttcttattaactgatagattatatgatttaatgtcatctccagaaacagacgatcaatttcaattgatgaaaaatgattctaaagtttataacacttcagtggtaagtgaatctggattacaggtcaatgatccaagagtagtgtttttatcttcgattggtcattggtttgtgcctttccattttaacttaaattctcagtttaattattacccgaatattatttttacattattcagatatggaatggccaagtgtgcaggtattcaatttgttaaaactatggcaattcgtcacccatctgttttatcagttgcagttcatccaggaattgttttgaatacaaacttattcagtcatttgacacatctaccattatttggaactttgttttggattttctttcaaatatttgattgggtttttggtgtaagcaacgaagaagggtgttattcctctgtaaaagcatcattaagtgacgaatttgataaatctgtaagcaatgggaattattatgtcacatttggtgttgaagctaatccaagtacgatagcctctaacaaggattatggtgatgagagttgggcatggaccgtgaaacaacttgaggaaagaggtcataagatctctaatctatagaggttcttgaattacattaggggagcatgtatcataattatataatagccttttttttagtcattgctttatctagaatagcacgaataaataatgcctttggaaaacaaaatttaaaaacaaatttataaagagaaataattaaacagttgtttatactgtttttaataataacagctggttgtcctggaactgcattgtcaatagacttaatcttttgtggaatttcaacatcttcttcggttaaaatatttttaccagtagtagaaccatttgcaaatgaaacgattttaacatcagtaacattaattgcagttggggacttcttaattgaattaaccgcttgtctaacaacatcaatttcgtcaaataataattctctattgaaaacttcatcagccttttcagttaataattgtttctttaattcattgataaatggcatagcacgcttcatatccttaccatcaatttgttccttgacgaatttcatatcttctaatttaccttcttcatgtaatttctttgaaatgtcaacgtatttttgttgccattctgggaatgaagcactaatgaaaatagtaattgaacaatctttttccttatcaacatctacattaccacccttcttcttctttaatgctaaaccttcagattctctaatatttctttgtaagtttctgatgtaagttaaagctgcagttaattcatttgagaccagcagcttctggaattggccatttagcttcattaattgaagtcttcttttcaagaatttctctataaacataatcacagaaatgtggagcaattggtgaaagtaatataacttgagtttcaatatatttgaaaactaaatctctatgtaaacctagaccagttgagattgagatatctctatagaaatctcttgaatattgataatcgaataaacctgtctttaatgcagccttatagtaagtaatatcataattcttataagtttcttcaataagtttgttcatttcgttatcaaaagctttatcaaagaagttgaaaggtccagttcttaattggtctttagtttttttcatttcttcaaaccattcctttaagttgaaaagtcttagaatagctgcattagcattagtttcatcaaaattagcatcttcaacagtatcacctgcatcagcaagtgcaattctacttgcgtcagcaccgaatttaccaactaattgttctaaagtatagaagttaccagtagatttggacatcttagcattatttaataataaatgaccattacatctaatacctgctggccagaaagttttcttgaataatgcaacatgacagtaaatgtagaaagttaaatgatttggaattaaatctttaccagaaattgattgatccattggatagaaatattcaaattctcttcttaataagtttaatttatcagttgaaatcttaatattatctaatgaatcacctctacagaagatataatcaaaagtttcatctgttaaatcttcagctttaatacctaatggaccaacagtttgtccattaaaatcagaatgaagtaaatgacaaatagtatagaatgattgataaacagttgaatctgataatgattcaacaagatatttttcatcccaaggaattttagtacctaaaccataagttcttgaaagagcccaattctttaaccagttaagaacaccttcaaatgcgttattagtttcactatggaaagttttcatttgacctaaacattctaatgcttgttctttccaattttcttcaccataatctaaataccattgatcttctaatgaaacaatacatgaatcaccagatcttgaaataacagcactttctggttcattataaatgattgcatcacctgaatcaactaaatcttgtttaacctttggttttgcaacttcaactgattcacctttgtacttaccaacaattaaagtaccattatagaaaccttctttgtaagctaattcctttgcagctgctaattgattagtatcctttggagagttaatcttcatatctttaactaagaattcagcacatttatcaccatatttaacagtgttaacaattgcaacaggttcttcaataacccaatctttttcaattttgtagtattctggtttattaaataaatctctagtggtaacataatcatctggtgaatcagatggaacacaggtaacaacaccggtacccttgttttctaaaatagtttccattggtaaaactcttaaggtttcatgaacagctaatggggcatgaatctttgaaccaactaataattcaccattaattttaatttctgaatcgaaattacctctaactggagttaaatcttgataacacatattcttgaaagctctttcagtacaaacataataatcattatctgaaactttgaaaataccatagttaatctttggagaaacaaaacaacaagtttgaccgtacatagtttctggtcttaaagttgcagcaactaagaagatatttttattttcaacatcaaaattttcagctttgaaatattcaacagcctttgaattaaattcagtgactttgattttgataccagtgtattcttgaggtaaaacagcttcaccagattgtctatcatgatccatacaaggttgaccatctttaatagaataaatagtatatcttttaccgaatttaattttacctaattctcttaatctattcatttgccatctaacgaaagcatcataatatggattcatatcagttgtgatcatagatcttctccaatcgactctaccacctaaagatttaacatgtttttcaactaaaggagggaagaaatctaaccaataataaggatcttggaatttagcaatttcttcagttggaatacctaattgttgcatgatttggaattgatattttgcattaccagttttttgagcaacttttgcctttgtagcagtgaatttagttggatcagttttagtctttgcatctttttcattagattctgcttcattttcattatttgaaggtaattttgagaaatcttcaccaaataattcaacttctctctttaatttatcagcagcagcacaaattggcataccagtacaatggaaacctaaagcgaataaagcttttttatttcttaatctttcaaaacctacaccaaaatcaacttttgagtaagtgaaaacgtgaccagcatgtaaaacaccattcatatatggatatgccattgaagcaaaaaatttaggatgttctgaatgtaattcttcccatgaagtaccgtatggaacgacatcattagttggagcatcaacttcataaggtttttcattttcccaaattttttggtattttttttcaatatcaatcagagtatctctacgagcggtattttccataacgacagccttttggccctcaggaacggcagttgcagcagcactcattgtaggatgttgaatattaaaaggtaaatttaaagtaaaagaatgatttaaagcagtatcaaattgtatatattgtataaaatctggacaaaaagttggaagttgaaaaattatgagtcttttctcggaaatttgacttccctctcggaaattttgttgtaagaaaaattgggaaaaaaatttgaaatttccgaatggttccacgtccctacctatttagtcaatagtttcttttgattgtaattgtaaactccttttcttgtttttatttcttttttcacttacttatatcttcttccagtagtatctagacactatgtcacaagtaactgataataccccaatgataatagattttagtactgattcaatagcagctattcaagcctcacttactttgaaaaaaccccttatgttatatattgaaactgaagttgaaactgaaaattcaaatgattcagttaatgaatggattgatatgatacttacaaataatgaatttgtctctaatgatactaaaaaattattctgactcattttttaagattaaagataactaagaactcacaagactttaataacttagtatctattatccctgcattccataacatcttaaccccgtgtattttatttatattcgcaggtcaagttattgatcatatacctcaagatcttgatccaaaggatgttgatactaaaattaatgatttaattaagaaactttcaagttctaatcttatcaatacttcaaataatgttaataatgatacatccgatttaactccgaatatcccgaatactgatcaatctactaatcaatcggatatatcgaataataacaccaataatgtcaccattccaactcctattccaactaataatagagtaccgaaaaaagtatcaactaaatcagaattcaaaaccttaaaggaggaagcagccgaatttgctgctcaaaaatatagggaaaacttaattaaacaacaaaatcaagcaaaaaaagatcgtgaaagaatcttacaacttatggaacaagatagaagagaattagagaataggaaattagagaaaatcgtatcaccaaatcttgataatgatactaaaattcatgaaaatttacataatgcaaaaattcaaaattctgaaatttatacaattcaaattaaattatttgatggtacaactattcgacatcaatttaagagtaatactaaattattaaatgtacgtgaatacattttaaaagaataccctgattataatataactccattttattttttcaaaaatattgatcgtacaacattaggtgaagctgatgaaaataaacctttaacataccttaacttaaatatgtgcacattaattcttaaacctttagaacatgatgaaacttttaaagtatcagttgctcataataatggtacatttaattggttaaagaaaaaaataaattcatattggtggccaaaggaagaaattcatcaaattgatacaaatcattcaaatcgtaatgatacagtagaatcagatagtgattgtgatacagcttatcatacaccaattttatcatctacaccatcatcatcttccatacgtccaattgtaagtagtttcaatttatatggatctcaaggtcttatatcttcaacaactaatagttctgatcatattaatacagttgatgctgaaaatgatgaaagtaaggataaattagctgaatcaacaaatactgatcatagtacttatacagttaaagatgtcgatgatgttccaattcataatggtaacagtatttcactgaaattttctgatgaggataaataaatgggtttatagaatatttgtaaaatgtttcattaaaattgtttttgtaaattacataaatgttatttgagatatacataaagtttaattagttaattgtttaagagcggggtatttatttatttattcaagtttgagctgaattttgagtttggttttcatcattaacattaaaattataggtgaatgaattaggatcagtaaattcttcaaaaattaaagagtaaatatcattcaataattcttctttattattattaccatcattttcatccttattaggtatttcaagtgatggatcaattggacctggtgatggtaattcactatttaataatttattttgaatgttagtgatgtaactatcagttaactgtcattggttttgaatcagatggtgtatttaaaattgatgtactagttgatgtattatctgaattagtatttatatcagtaatattaatactatctaatttcattgaaaaattttcaactttaccatcaaatttgattaaattatcaacatcatcattattttcttgtttaatattaattgttgataaatcattattattttcttgtttaatatttattgatgatagatcattattattactatcttcattaatattatcagtagattttgaattaaaacctttagagaaaattatttttaacaggtgggaataatgaattatattgtttcctctttgatgaactaaaatcaaatattaaatctctattaccaaaacttaaacgtttttgaccaattgaagattctgaatcattaagttcatccatttcatcaacatcatccaattcatcaatatcatcttcttgaataatctgatttctatcaccaaaactatatcttttattaccaagtataacatcattattaactgaacaattaataatttcattatcatcattttcatcatcatttataataacttcattatcaatatttaaattagcattatgacgtaataaaattccatcaattaaattgattaattttgtacaagtaggatttgatgaacttaagatacgtaatgcctttttacctttaataatatctgtccaccattcattattatgttttgattttggatttgaacattgacaagctaatggaattaaaattgcttgaaataagaaataagttgtataccaatttgaaaatgaatttaatttattaaaaggataattaagatattccattatattatcaattgtctttgatgcagcattaagacaaactcttcttgcattcttggaagtcttctgataatgttgcttcctttgttgaagttttagaagttttaccagttgaaataagtacaattttttgccaaatataaggacggaaaattaaaatttgtaaatttgaaattctccaacttaatcttgcacgagataataaaaaccatgaaggtgtttttgaaaaatcattattgaaatattttttaataatttcatcaattggaattgaacaatttaaataatctggtaaactttcattaaatttttcaagttttaaatccattgcatgacattcagctaatgatggtctatttttggaaataatcttaatatagaatggatcagttaaaatacttaattttgcttgttcaattaaagctgagtaaattgttggtaaaccattatcaggtaattttggattcttacttaatgtataatgacttaaaaatgaagcatcatttaataaattattaatttcttcatcatttaaatttgaaggtaatttaacatcaattatatctggtattggtatatgagatggtctaccaaaagtaattgcagcacctgcatcaaaaatataaagacaccaccaaattctacattttgattcttgatcattaataaaagcctttaattcattaacatttttctttgttgaatcctttaattcaatttccttatataaacctaatgaaactgccattgaaacagctaaacctaaataattccaacctgtatttggtttatttcttttttgaacataattacttaataaaataagtgaaatgacataatcaatattaccaagttcaaaaacatgtgataaatttaattttgctaatttataataatgtaaatcataatttgttgaatcaccatacatacaccaacaacctaaagcagtaattgtataataaagacaccaccaagatggattatttggattaagtaaatttttatttaaattttctaaaaatgatgatttattaagtaatggataagaggtatgataaatatcaaaataacttttaataaaatttaattgaatttttctatcatttaattctaatggtttaaaagtttgaattgatgaattactatgatgtaaactatgatgaggagtatgatgtgtagtaaaatttttttgattttgattttgattttgtaattgatttaagtttaaatttgaatgtaaatttgaatttgagtttggatttgaatgtgaattttgtaaattttgtaaatttgaatttgattgtaaatttaattgtgaatgagaatttgaacgagaattataattatcattaacttcatcagctttcattatacgtaagaaagttgtacttgaaccagcgccgaggaaaccagattttgaagcagggttcgcgcccataccatcaagggaagtgaaagaagttatctggggtatagaatttgagtgggatgaattaattgattgaatattaagtaaggaatgtgaatgagtataagttaattttggtgaagaaaaaggtgaaataagtggagtttcattatttgattgattatccaattctgcccattcaaatactgatctatctgatttatcagttaaataacgttcaggtaattttggttgagatttaagtgaatttgtaatatttaatgtatgagcagataatttatcagcaaccgttgctcttaaattagcaagtgaagtagatgattttgcagagagtaaggagatagatgaagaagatgaagaatttgaatttgaatttgaattcgatgaagaagaatgatgttgaacctgatctattattattattattatgattattattagtattacttgaacaattatttttaggtaatgtagaatgaaacttcaataatttcatctaatgacatatttggtaataaattttgtaaaacattttcaagttgagataacttatcttcaacttttgttagatgagaacgagttaatggagatctaacagtttttggagagtaaacgcaattccaattatgatcaatacattttgtacaacgaggtaaatcttttgaacattttaatttccgtttacggcatgaatcacaggcctgttcgatttgaacgtttgacattgtgtatgataaagtaagaagatgaaataatattaaattaaatgaagtaaagtaaagttaagtaaaataaaataaaaggagatacaagtactagaatatattattaagatacagtagaggagacaacacagtaaataaatagcaatatatcaaaatataaattaatcccaaaaccaagagaaaaagttaccataaaatataataatgttaaaatttataacgatatgtcctgaaatacggcttatatttaaataaatgaataaattagagcgaatataattttttccattattgaagaggagagtcatttgaagtgaggagacattagatcatcggaaaaaccatgttactttttaattaattatgagaaataaatttaaataaatttcaataatttaaataaatgatccgataattccattattgtttgttacagccccacattgaattactattatttatagtttttccaggtttgcttttctattttttatattattgttttaatatttcactcaaagtatcgttattatatatcgtcattaaatcgttatatcgttagatcgtttatttctttttcactaattggtaaattttgttaaattgtaacatgtttatagatttttcattgccccttgttcgtttcagaattatttataattatttaatttattatcattacatcatataccgtatcttatttctaatcccctcacagtattctcattctcctcattatcaatattcctatagaaattaacaatccaactaacaatacccattaatcgactgaaaaatttattaaatctaacatttttataaactaatgttaaatttaacagtaattcattaatatatccaataatttcaattattgatctaatcttttcactttttaatatacttaaccattccttatatttaccaccaggtattttaacaattctactctcaattttaacaagtttaattaatttatttattttagaaattcttaataaaaatttctttaaataaattaaaatcattataatataaattttagcagcttgttttaaatccataactaattattttcaaatatgaattattcttagttattcgttcaattcctgggaatattgcttgaattattgcataattatcaacaattgataatacactttccattttatccaatatattatcctcaattttttcatatccacttttatcatatactttaccctctattgtcttcattggttgtattgtattactatgaaaaggaatagccttgtacaacaatccctctcctctcttcttaacttgttgttactctagcttgtaatcctagtaatttacctatctgtttctagtcgcgcttaaaaaatcacggtacagaacatttattttcccacataatcataacatgacataacataacaaaaattttctttcagtataaatagcccactgtccgcacttttgaaagtggcaaattttgacctctttgcttctttctgttaagacaacagaaaaatataatgttagaaaacattgaagattacgaaaatacattaaatgaactaagtacattaaaaccacctggagtttcaggttcaagaattaaaaatttaaaagagtattttttatctcataaagatgaacaaattaatttagtaagtttattaattaatagttgtaagaatatacccgtatctaataaacttggtgtattatatgttattgacgcaactacaagaggtttaattgatgaaattggtaatgtagatgttgtttcttcaaatccttcaattattaaaattcaagaaaatattgaagatttattaaatatttctataccgaatgcaaatgaagatgttcaagatagaatttgtaaattaattgaaatttggattaattcctcaacttttgataaatcaattttattaaatactaaggataaatattttaaatctcatactcctcctggtacacctccaaagaaaaatattgaaacagttagttcatcttcatcatcaaactcaaattcaaattcaaattcaaaatcaaatgatccatcatctgttttacaagctttagcaagtttagctaaaagctctccttctccaaatactaataacagtactagtaataatactaataacaatactaatactaataattctattaatactactaatagtactaatcctactactgtaacttcaccaccttcatcttcaacaaacactgattctgctaactcttcaaatccaaatgcaattttccaacttttacaaaatatgaataaaatgacaaataaaaatgataaatcagttacttcatcatctgatagagatagaactgatagaccaagaatgaaggatagagaaagagatagagatagatcaccaactcgtaataataataataataataataataataataataataccaataataactttaatagtaatgaaattgatccaccaactcatgatggtgaaagaaatataccttcaaatcctcattatagaatgaaaaaatcattcgttgatccaagtattccacaaggttgtattaatgttttttcaagaactattttcattggtggtgttccaaatagtatggatgaatatcaattagttgatactctcaaaccatatgctgaagttcaaagtgttgtaattaatacatcaagaagacatgcgtttgttaaagtttattcaagagctgaagctgataaggtaattcaagcattttcagtttctcatccttcaggtttaagagctagatggggggttggttttggtccaagagattgttgtaattatcagacaggtatttcaacaattccaattcaaagattaacagatgctgataaaaaatggattattagtgcagaatggggtggatcaacaaatgaatttccattacaatctggtttatttgttgaagaacctgatattgaagttggtcatggagtttcatcaaaatcaatttcaagaaaaatgccaacaaattcatcacataatggtccaaaatctgataatcaacaaagaaacaacaataattataataatcataacaatcataataaccataataataatagatataataataattctaatccaaataatatgccaatcaattatggtggttataataataataataatggtttaccacaaccaccacaaaattatcaaaatatgccataccaacaacaacaagcaccatatcaacaaccacctaataatcaatttggataccaacaaccaccaatgtcacaaccaccatcatcaggtggtatggcaccaaatatgatgggatcaccaaatagtatgccaatgtcatttaatcaagtaccaggtcaaccacctatggatcaagctgcaatgatgcaagcgatgatgcaagctatgactcaaatgcaaggacaaaatcaaggacaacaaggacaaggacaaccagatatgagtaatatgttacaagtaatggcaaacatgatgcaacaacaaggtcaacaaccacctcgttgagaataaatttgaaattgaagttgaagttattgaattgaagtaatttatagttaaaactagtaatctaacagtattgtacgtaataataatttgatttgtaaatcatcgatacagaaggtatactatcttctatcttctcttgcactatttatctctaaatgcgccgcatcaaattttcacattcttacactgcgccgcaatttggttcatttttcaaacagtagtaagtaataagtctaaattagctctaggtgggaaattaaatgcatgaaaattgtatattaagattaacaacacgtctttcttttcccaatctttaactaatcacaatgggtaaaggtccaagtatatttagctttgacgcctttgctaagacaattgatgatcgaaagattaaaactagtacaggtggtataattacaattgtttgtatatttacaacaattattcttttatttaatgaatatcaagattataatagaattgttttgcgtcccgaattagttgttgatagagatagggatcaaaaattacaaataaatttagatatttcatttcctgaaatgccatgtgatttattaagtttagatgtaatggatttaacaggtgaaattgaatttgatttacttaaagaatggatttacaaagataagacttggtggtaattatagaaatgatgagattgaagaaattaaatttgatgcaaatgaaattatagatgaaactaatattggtacattagatgatggattttgtggtgaatgttatggatcattaaatcaacaaaataataatgaaaagccgaataatgaaaaaatttgttgtaattcatgtaacagtgttaaagttgcatatgctaaagcaggttggaaattttttgatggtaaagatattaaacaatgtgaacaagaaggttatgttgaaaaaatcaatgaaagattaaatgaaggttgtagagttaaaggtagtgcagaaattaactagaattggtggtaatttacattttgcaccaggtgcatcattattaattaatggtagacatgttcatgatatgtcattatttgataaacatacagataaattttcatttaaacatattattaatcatttttcatttggtgaagattcacatgaacttcaagaaaaatttgaaaatgataaacatgatcatagaacaagtcatccattagataatgttcatgcagatgctggtaataaatatgaaatgtatacttattatcttaaagttgttaatacaagatttgaagtatattaatggagaaattattgaaactaatgaattttctgcaactaaacataatcgtccattaagaggtggtagagatgaaattgataagaatacaattcatgctagaggtggattacctggtactttcttctattttgatattagtccacttaaaattataaatagagaagattacaatcgttcatttagtgcattcattttaagtttatgttctgcagttgcaggtattcttacagttggatcacttctggacagaaccatttggtcagcacgtagattcatcaaggacaagaagagtacttaaattatagtgtatatatcgtgtataaattgtagtagtaaattgtcatgttaaaattaaaactaaaattccgaagtccaaaattgcgagaggaggacttcgtattattaaaaaattcctttccttcgcgtaatgaaaaagctgtttttttatagcatcaaattaatgaaatgttgaatttaattatttagcttttctagaatatatatatatatataattattagtatattaataatattaatattttacttttgtatagcaatcaacatgtcatcgtttatggccccgattagaggagtgagttttagctctaataactcaacaccacagggaaattcatcatccatctccatgtcaagtgaagttcatcgtcaacagagtacaccatccattaaacgtatggacacggtatcaacaacaaattcaaatctaacatgtgatgattcattatattatatttcactgcgtttaatgaattcattagctaaagttcctggaatgttaccatatattgaattagcatataactgaagcagatacagcttcagagaaacaagctatggctataagttcaagtataacatcaagtaatcaaatactccaatatcagattcatctaattcttcagatatgttattaaataatggtagttcattatcaataagtaatagatcaagtacaactactaattctaatccaagttcaggttccttacatacatatttattaaaatggaatgaatctatgtatacatttgcaacaggactgttaccagctcagatatcttatgatcctgtaacaccactttccaaattacttaaacaaggtgcacctttgtgtttattatttaatgcgttgaaaccagaaaatgctattgaagttgtttcatctgataatttgaaaatttgcaaaacaagtgtttataattttgtaactgcatgtcaattacaccttaatacaaaaaatgatgaattgtttacaatatcacaggtattttcagatagtacaacaaatttacttgatgttatacattcagttaattttattttgagtttagaaccttcattcatttcagatccaatacccgatcaaataattataagtgattcaagatcaaaaattgtcaaagaattaattcaaactgaaagaaaatttgtacaagatttagaaaccttggtaaattatagagatgatttaattaaggctaattgtatattgaatgaagatattaatatgttattcccaagtttaaatgaaattatagattttcaaagaaaatttttaattggtctagaatgtaatgcaattgtacctcataaatatcaaaggataggatcagcattcattcatgcaggagttgaaagttttaaaatttatgaaaattggtcattatttcaaagttttgcaaatgatttaattcaaagagaggcaaataaattaagaaatgtatcaaatataataaaagatccttatgaattacaaaatttttacttaattaaaccaatacagaggctacttaagtatcctttacttttatcacaattattaaaagaaactgatcaatcatggccaaattataatgaattacatcaagcttatttaatttcaaaggaagttgcatttacgataaatgaatcaaagcgtagatcagaaaatttagtacatttaaatcaattaaatgaacgtgtatctgattggaaaggatataatactaaaaatgtaggtgatttacttcatttgaatgttgttactgttaaggatctgttaactgatggtcattcaaatgaaaaagaagttcattgttatctttttgaaaaagttatttattttttcaaagaatcatcatcaactaagaataaattacttggatcaaagaagaatccatcgatatttcaaaatagttctcataataattcaagtaataatagttttatgtcaagtaatagcgacttcaataataataataataataataaccaatccaatttaacattaaatggtattgtttacatcagcagaatatgtaaaataactgcatcagataattcacaatattttccaggtactccaggtcattatcttacattaagatggaaaggtaataaagatactggaggatgtattatgaaatttaaatccgaggaatctctgaaacaatggcataaaacaattaaacaattatcaatagatttatcaaatgcttacgaagatactatgctctctaatcatcatattagtaagagtataagtagtttatcaagttcaacaagtttgttaacttcaagtgataatagatcaagtagtacaacaacttcaacaaataacagaaactcagataaattaagaacatcatccgattctagtacatttatgagaaaattaagatctactagtagttcaagttttactaatttatcaaatgtaaattatccaccacttcccaacagagaaaacattaagatcattatcaatatcgagtgtgaataattcattcataaatcctaagatacataaaaaatcaccatcaaatagttcatcaagtatattaaatgatgatttgaaatctaatttttcgaatcttacattaaaacaaacaagtccagtaataagtcatgaaaattccacaatgataaaactgatatttaatgaaaatcaatcatcaattaatttatcagtaaattctgagataagttatgaaaccttagtttcattactaattgataaaatgaatattaatatgaatagtgatcaaaaatatacttttgaaaatataacaataaaatttaaggatgaagatggtgattatattagatttagaggtgaagatgattggataattgcaaaggaaatgcttgaagaaatggaatctgattatcaaattcttgaattatgtgtttccatggtataaacataatgatatcacgaataacacaaacatggatactctctttatagacaaattatatacgacattaaaaactgttaaaaaaattagaaaaactgtaacacatctatggagtaaatgagtgggataataaatacatcccggagtttttaatacacattaaaataaaacactaaacactctaaatctgaccagtaatttcaatcaaaagtgtaatcaccacatgtactgaaaaaattgaaaaaaccgttaaagcgcataaatcgaaaataaaaataaaaaccggaggaaatttcaattgacagtcggcaatcaatgaaaaattaatttaacacaactagtgactctttccattgtcaggttatttgttgaaaatttatatttaaaatgttgaatcatttacattcttttacctattactacatagataacgtgtgtattcagtaaactactgtaaagaatgttatcctttgttcaaagaaagagttcagtacgcattctacgcaatgttagtcgttataatgttttgaaaaaccttatcagaccaagtacaagattatcaacattcattccaagaacttcaacttcagtcactgcaaaaagatccttttcattatccacgagaagactacaaagtatcgaaactgcacgttccgaattagatgaagatgaacttgaaatgttaaacgaagagagagtcgttgatacagttgacgtatgtatcgttggtggtggtccagctggtttagccactgctattagattaaagcaaattgataatgaaaaaggtgatggtgaacttagagttgtgctacttgaaaaaggtggtagtattggttcacatattttatcaggtgcagttttagaaccaagagcattaaatgaattattccctaatgaagatgggattccattacctaaagaaattgtaacattagtaactgaggatcacatgaaatttttattcaagaacggaatggaaattgatttacctgaacctccacaaatgataaatactggtaaaaattatattgcaagtttatcagaagttactaaatggatggctgaaaaggctgaagagttaggtgttgaaatttacccaaatacttcgatcagtgaattgatctatgatcacgaaggcgcagttaaaggtgttgctactagagatagtggattacaaagaaatggatcaattagtgaaaattttgaaaaaggtatggaatttcatgctaggatgacagttttagctgaaggttgtcatggttcattaagtaaacaagcgattaataaatatgatttaagaaatggtgttaatcctcaaacttatggtttaggtattaaagaagtttggcaagttgatccagctaaatggaaagaaggttatgtttcacatactattgggctatccattaagtgatggtgtctatggtggtggatggatgtatcattttggtgatggattagttagtgtgggtatagttattggattggattataaaaatccatggattagtccatatcaagaatttcaacgtatgaaattacacccattttataaagatgtcttaacaggtggtaaatgtatctcgtatggtgcaagagcattaaacgaaggtggttggcaatctgttcctcaattacactttcctggtggtgttttggttggtgcaagtgcaggttttatgaatgttccaaaaatcaaaggttctcatactgcaattaagagtggtatgttagctgctgaatcaatgtttgataaagttgttaaattaaaggaacaacaagaatctgaaatgttagcatctaatgaaggtaaagaagaaaaagatgaagacgaagaggatgaagaagaagaagatgaaaatgatggtttcaccattacctgaatggaaggcaattgatttgccagaatatcaaactgcatataaaaattcatggatatatgatgaactttatgaagttcgtaacgttagaccatcatttgattctaaattaggtatacttggtggtatagcagtctcaggtatggttacattaataactaagggtaaatgaaccatttacacttgaatttaatcataaagattctgattgtgttgaagatgcaagtaaatatgaaaaaattgaatatccaaaacctgatggtgttataacatttgatttaatgacaagtgttagtagaactggtacattccatcgtgaaggtgaacgttgccatttacgtgttcctgatatggatttacaaaaacataaggaaatttcatggtcaaaatataaaggtattgaacaaagattttgtccagctggtgtctatgaatatgttccgaaaactgatgctaaagatgaaaacgatgttgagtttaagattaattcacaaaattgtattcattgtaaaacatgtgatattaaggtaccttcacaagatattaactggacagttcctgaaggtggtgatggtccaaaataccaaatgacttaatattaacaatttaacaatattattcataaattttaaaagtagataattttttattaattagaaaagaaagttttatatactttatacttgtacagttcactaaaaaacattaacaaaagtaaaatagaataggaactataagttaccggtaaacatttgacttaaatcagatatattcattagaatatttgaatcgagaccttggaattcattaccatataaaaggttgaatccatttaattgcaaatttggtttaattgcagttttttcatcattatattcatcatcattatcatcatcatctaccatatcaatatcctcattaaaggatggtttggatgttaatatatttttatgagatatagtatacactaatccacacatttcaaaatattgtaaatttggtaaataacttaatgatgtgtttagttgatttttaatcaaatgatcaaatagataaccattcttattataattgtttaatcttaaaaatcttgcaattggatttataatggaattgctattaactgaataattgcaatctttttgaaccaaatcaagttcctgcccaataattaataatgttgaaactttaattgtttcctcaaataatacagaagttgtagtagatgttagtgataatttttcaagaattgaactgcaaatagtacatagacaattattcaaaaagtttaaatgtgggaataattgaattgcatcctccaatgtaggtataatattacctattaaattttctgatggttgatgtacatttattctaacatcatataatgaatttaaattatttgcaattggactacctaaaaccattaaaaggttagagaaacttaatccatcaatatttaaatcaagattaatttgtaacaagtttctaaaagattcacaaaattttaacaacatcattgatcttaaatgatttttatcaatatcttcagtaactaaatcatatttaattaataatttgttaatattaaatccatgatgctgtataatagttgataatttatccaatgatttgactaatgttaggactttaccatcatcttgtattaaaattgaaaaattggttaaattttcaaaaataatatgtttcccaatcagtgataatacggctgatgatgatgtattagttaatgataaagttaaagtatgtaaatttgttaaaactatccccatttttcttaaaatagcaaaaaacccaacaattcgtcgataaacaatttcataattttcatttgaattgactagaaagtgtaattgtgataaatgtttaatcatatgtgggaattttgttatcaatttaaaaattacaatatcttcatttttacccaaattacccttaaaatataaattcttaatgttttgatgattgaaaaattctattgaacctttattaaaatctaagaaatcacaaaaattataatcaactataattgtatctaaattttgtgcattttcataagttaatggtaaaatcttaatattttcagggaaatgatattttttcaaattttgaaaaattggaaagtattcagatgtacgccacctcggtagatcaaatatttgagtatcaacaagtttctctaaatataaataaacaataaaatttgaataatagaaaccaagttttgacggaactgaaattgaatgaataaatttttcaatgttagaatttgttaatattgttatcgagttatttgtacaatgattatttgtttgagcaaatgatagttcttcgctgtttccatttgtattagaatataatataggttcataaataatagtatgatataatgattgtataattgaataaaaaatataatgattagtaaatgaaaagtttttctttgaattaatatctaaatgatttgtaattatttgtagtacattctctgggaaatctgttatatttatcatgttattccaaaaagagcttttggtatttatatgatttatagtatattaataatatgataaatggaagttctgtataattttatttattatattgattttaattgttgaacacgttgaataattgttgaatgagaacccacgaaaagaaatatccctaatgcaaatggaaagtctaagctgttgtgatgtataagttaacttgggaatagaagataaagaaaatagtaatacttatcagtacaggttcttagagtgcctattcatgtaaatggccatttaccgcggtgtgaaaagttgaagatttgaaggttttattatggtgaaatttgatttgactgatggtagagtagagtatggtagagtatcgtatagtagagtagtatatatatatacaagagtaagagtagaataacaataaataaattatacaataagttccttagaggaaggaacattttcaaatccaaataatttacctgcattgacaacttgatcatcatatgcatcctccatattttgaactttaattgatgaaattgcagatactgtaaatgtatatgttttattaagccaaaataataaatctgtaaccactttaatagtcaaggtaacatattttctagttaaataatcatgccatgaatcaatttcaccagtttcaattaaaaattgttcaacatttttatttgcttcatcaaccagtatatttaatctattaactggtgcaccaaaatttctatttaatccttgaacaattctcattgatctcataacaaatactaaacataatgggaatttatcagtattttggaaaaaatctttcattttatcctttaatacaacttgtttctcaaaatatgtcatatttttcattttctctatatgagctttcattgttggactatttttatcacccataccagctaatgtcataatcatttcatcagcttccataccccatgatgttaaaacatctttagtttttacataatttttttccatactaaatttccaaaattcactatattgtctcttaaattttggtgtaaaatgttcatataatccatgatctaaaataactaattgttgaatttccttctccctttggaaaaatttagttaaaggatttgtattttcaactttaattttacgaaccattaaattacctggatgtaaatcacaatgaacaaccccccaagtgaaaacttgtcttgcataaattttagttatttgtaacataattttttgtaaattaaaaccataatttgataattcctcatatttaccaattaattcagcatccatccattcacttataagaattttctttgaagatatattaccataatattttggtatataatattcatttgaatttttaaattctgaatcattattaattaaatttgaaaccatcacagcattttgatattctaatttaaaatttaattcctctctcattttttcacaaacataatcaattgttttatctaatggcatttcaaataaccaaccataaaatttcattacagctctataagtaaataaatcagattctaattgtcttgaaactgaatttttttgaattttaactgcaactttatcaccatttttaagtattgctttatgaacttgagcaattgaagcagaagcaattggtaattcatcaatttcattgaaaatttcattacgataattttcacctaactctttccttaaagtcatatcacaagttgtccaagattcaactggtgccttatcaaataataatttaaatttatcctgataatgttttgggaacataacaccttgaactgcaatcatttgacccattttaatatataaacctttattttcaaggattaaattatataatctctcagcattacgttcatgtaataaatcaacatcataatcttcattaaagtgtaatttataatcaatagataattttaataaagttgaaattgaattataatttctttgaattaatccagtgacctaaatatgtatcaccaagataaattaatgttgttgtacctaagaaacctataaccattttcttccaaaacctcatctttgcaccagttttaccattgttaacattcttattaccatcactattaccaaacgataatgttttaccctctgggatatcatgtacagtctcttgacctaatttcttaggtgatggtggtctatttgataatcttactgggatctttgcagcattcaccttacttgcaaaatgtctgtagttccccatacgggagatcccactccaagatgatgagtgtatgtacctgaataccattcctgcagttacagaaagaagcagttgttcatgtatacagcatatacagactgactttaagtccttaataactccgtagaaatgaaaatagcattacgtaacttttcagtttcatgaaaatttttttgttacttagcattattattattattattattattattattcttttaattattattaaaattaaagtactagattaatccacagtttgatttaatttgtatctcctttaattcttttccttttgatctcttggtttatctacactatccattgcatattctatttgcttacttttagtggtatactttattcaattagtaggtacagtaagatcttatcaatatcaggaaaatttgaggtaattaaattatatttctcatataatatacagaataatttgattgaaataattttaaattgaaataaagtcattataaaaattccatactacacacaaataaactatatacatactcatataaatatataataaatgaaacaatgaaggaaagtcccagaaaaaatcctacaatgtcagggaaatctaataaatcaatagctaagaaaggtccctataatagaaaatctattaaaaatactactaataataattcaaatcgtcggtttagtatattaagtaattcttcaatatcaactgataattcagattctgatgatagtgattcttcatctaatgatcattatttagcaaataagagattaaataccaataataattattatgaagatgaagaggaaggtgatgaagatgaggaagaagattattcatcttcatctgatgatgaaaatattgattttgttcaattaactaaacagagaagagttaaagcaatgaaagctgttaaaagtttaaaacaacaaattaatgaaaattcttcaatatcacctgatcgttcatctcaattatttgaacaagaggaacctgaattagatgatgatttagttgatgcagttatagaaaatgaggaaagaaatatgaatttcgatgaaattaattcaactaatacaaatactccaaatgctacaaataataattaaataatagtaataatttacatgattattcagatgctgatttaaatgatgatttggaaaatatggattttgatttctcatttgatgatgatgacgataatgattctaacaagaagaagaaaaataaagacgataaacataaaaacaataataatagtaacaataataataataccaacaataataaaactgattctaaaaatgttttggataaacttagagatgaagatattggagaattagttcaaacctccaatccaataataaataaaactaaatcatcagaactcatgaataaaaaaattgatatcgatgttccaaaacttgatgaaaaggaaattaattcagatgctgattatgaatttgataataatgatttaattcaaactttaatgaaagataatgatgatttagaacttcataatttagataatagtgatgatgattttgattatctgattgctaatcaacataatattaatcatgatataattagtaaatcaaataataaagaaattttaatggatggtttagataatgatgattcagaatatttaatgaaagaagaaactcaagctatattggatgattttgaaagagatccaaaactacaagattcctttaaaaatagaagaagtagtatgtatattcaacaatctttcaataatagtagtattgataataataataatgaagatttagatgatttagatttagatttattaaataattttgaacaatttttaccaaagcaacaatcaatgagaaggagatcttcaattttaaatcaaactttattatcatcatctgatgatgaatttgatatgaatatgaatatgaatatgaatatgaatatgaatatgaatatgaatatgaatattaatcataatagacctagaaaatcttataaaaaatcttcttccaaagcatccaaatatgcaagtgggaatcatcatgcaaaaaacattaaacatatgttaggaataactaattcagattcaaactttacatcaaaatttagttctaatgcaattgtcgatagtgatgatgatactaaattattagaatacatttttgaagattcagaatcagagaatggaccaacaccatcacaacaaattgatggtgatgaaactgatgaagatgttaatttacctaaaaaatcaaataaaaatattggtagtaaacatgcaaaggaaattttgtcatcaagtaaagatcaattccgtgctccaaaacttggtacttttatcactaaaaaaccttatagtattattgatggtgttacaactagattcttacatcctttaaataatgttaaatcatcaatgttacaaagagctgcttcaataactaatccaaatcatccttcaatatccaataataccaattccaataataattcaaatagtaattataatatcgcacttgatgaacttcttaatataagtgaatttgatgaagatacaagtgctgatcaaatggaagcaatgaatggatttttcactgataaacgtttcccacttacagcatttagaaataaaggtttaaatccaaatacaatgaattcatctgaactaatagttaatagtagaagattttcatttactgataagaacaataaaaagaaaaattataaatcatctaaatccaaaataagatcaaataaatcattattgaaatctaaaaatcaacatttacaacagtcacaatcacaaacattacaacaattacaacaatcacaacaatcaccacagcaatcacaatcattaacaaatttactgatacccaaatcaccagactctaacaatataaatgaaaatgatagtatgattttcgatccaaataatattgatgaagttttatttattgaagtcgaatcattaaatgatgcaaattttattaattcaaataataactttgaaataactgcaccacaaaattttacagccgataggaaacgtaaatcaattagtagagcttcaaaggcaagatttagaagagctagtattgctgaagctcatgctgaaggtttaagacaaactaaaaatggtttatttgatgaaaatgttatagatgatgttgaagcattattaatagatatgggtgatgcagatgatttcaaacttctttttggaaatccagtataatcagatttttttatttcaatatctggaaattattattattattagttaatactcacttcatttcatcttcaatttggttacttcctatttgttttttgtctttcagtactcgattcttgtccgttatttttctctttccattttcttgtatactaactttgctttataaatataatgtatattgagtttttataaattaagtttaccatgttttttacaataattaacacactattattactaatttaaaaaggtatgattcacgaaaaaaattataaaaaatgacttaatttacaaattttaagtaatattattattcatgtttgtttataaatctaagaaaagatagtaaattattttaatgcatcttcaggtaatatgaaattagttaatttagaacttaattcaagttgttgttgaatacatgatgataaatattcaataagtaaagtatcattaatatgagtatctaattttaattttaaatcatttatttcattatctgaaagtttaaatttgagggctgataataaaacttgaccaactttttcatcacctttaatttcaccatttgctactttggaacaatattctgacaatatttgaattaaatttgaaatattctttaattcagtttcaagttgttgtaattcactatttgatgtgattgatgttaaaagattttcattatttacagctttattgatatatttaagtgaagttgattcactctttgattggatgatttcattttcaataccgacaaatgcaaatgcacctgttttatctaatccaagactatgagaaagatatgatgaagcaggtaaaccaactggacctgagatatatgttttaagaattggtgtaataatttcattattttcatttctatattttaaagttaataaaatttgtggatttgatggtgaaaatttagaataaaattcatgcaataaacctgtatacatatctaatttatcaatagttgagaaccaaccaacaacctgaagttcaggattacttcttttgtataattgaaatgttgaaaaatgatgtgattcttcaaaaattaattcaccatcttcttccttatgtggtacaatatatgcatttttaatggtaacattaccatcatctgaacaagtacctaataaagtaccaattaatcttgttgtatttgattcttcagcagctgaattatcaaaatatattgtttcaataatttctacagctgcactagtatcaatggacacttttaaaggtgatacaattctagttgaagaatagtttggtttattaatatgaagagcaggagatgccattgttgatttgattgtataatgatatatttattcccaaaagtttaccctgtatttcaagatctgtagtgtcaatctagaggtaaagatactgaaaaattcaagaaaaaaattcttttgtaaaaaatgtcaaatttgagagcgggtaacacaaaagcggcaaaaagtcgcgactatggatttttttcttatgatagcagaacatgataattatcatcattaaactactgaacttgttctgtttcttgagatggttgaaaatgttatcctgttctaaactataggtactactgagtaaagtaaattaaaaaccacatgtaaactttgaatgtagaatttaatttatcttttttcttttcttcctcttacgtgtttttgataaataaagtttatttctttaaatattgatatcttgctacgcgtgaaagcaatgtcagaatcacccaatgaaagtgaagtttctactacaagttcagaatccaaaaaggaagaaacaatcacagttacaaaaaatcctttaaattctgaaagtcttcaaagtatagagaattgggggaatatatcatttactgatatttctaaatattttaaatctgaagcaaattcacttgattcattacctaatgtaagacaagcacaatttacatatggtaattcaacaccttcagattcttcaaactatggatcatcagaatatgaattacaagattcatttgctttaggtagttcaattgaaaatttgaatactataataaatgctactgatggtagcaatgatgagtcaaatgaaaaagtagaaaaaatttgtagaagagctagatttactaaatggttaaataaagttggtgaaatgcaatggtccaagattgttggaatgacgttagttttatctggtgttatcactgcagttttggcagcaacaatcagtgctattgttcaagaaagacattccaaacacaataaattgaatgattcaatattcggtaagcaatatcgtcatttagttggaattagatcaaatatggtagattttgatacaccaaatgattttaaatcttggaaagcatcagatggtgatgattgggttttagcattcagtgatgaatttaattgtgaaggtcgtacattttatcaaggtgatgatcagttttgggaagctgttgatattcattatgcggcaactgataatatggaatggttagatccttcacatataactacaaaggaaggtacattaagaataacaatgtcaaatgaaaaatcacataatttaaattttacttcaggtatgcttcaaagttggaataaaatatgtttcacacaagggtatgttgaagcatcaattaaaatgccagcagcaaagaattcatctggactttggcctgctttttggtctttaggaaatttagcaagagcaggatatatggcatcaactgaaggtacatggccatattcttatgaagcatgtgatgttggtgttacaccaaatcaatcttcatcagatggtttatcacatttaccaggtcaaaaattaaactcatgtatctgtaacggtgaagaatcatccaaatccaggtactgcaagatctgcaccagaaattgatattttggaaggcttatacaatgattattcacaaacttttaatgttgcaccatttgatatttggagatatccagattatgatcatcttgcaattacaaatcattcaaatactgcaatgaatgatttcatgggtacaaattatcaagaagctgtctcagcagttgttaaatctaatccaaaatggtatgaagagggtaattttataaaatttggaatggaatatagaagtgatatgaagaatagaatggataattatattaatttttatgttaatgatgttttaacattcagaattaccgaaggtgcatttcatccagacggtaatattgattggagaattataccaaaggaaccaatgagtttaatccttaatttaggtctttcaaactcttggtccaaggttaatatcagtgcaattgatttcccagtgttaatggaagttgattatgtaagaatttatcaaccaaaggataaaatcaatctttcatgtgatccaaaagattacccaacttatgattatattaatgatcatttaaatgcatatacaaatgccaatttaactacatggaaaatggcaggatatgaattcccatcatattccttagatggtaagtgcaagggtaagggaaaaggtaaaggtaaaagtaaagataaaaaagtaaaggtaaagaaagagctctaaataattaaatggggaaaatgagaaaatcaaaaattatttttcactttcaaaattttttttacattgttgaaattgtgtaaattttcctttttaaagtgtaagtttgtttaatcttgtattataacatattcatatcaatcagtttgtttgtaaagtgaattcaacatataagtaaatattatcatgtctgaaagaagttataaaaaaactaacattgaaccattttatgttggttcagcaaatgcaagtttttcagctgatgcatcattacaagcaactgctgtcttagaagacgtagttgttataaatagaataactaattctgtcgtacataccattcaaggtgatggaagtgatgttactactttacgtatttcaccagatggaactaaattagcaattgtctatctttcacaacaattgaaattatttgatattgaaaaaggtgaattttataaatcatataaattatctgcaactgcttatatgtcagcttgtgataaaacatcatcattatttgcatttggtttaactgatggttcagttgttgtttgggatattgaaggttcatttataacacataattttaaaggtcatggatcaactatttctgcactttcattttatggtgattttaattcaaagaattggaaaattgcaagtggtgatattatgggtacaatgaaaatttgggatttagtgaaaagaaaatgtgtttttacatcaaaggaacacaatgctgcagttagaggtgtaaatttcgataaatctggtgaactatttgtttctggtggtagagataatttattaatgctttataatgcaaaaaattggaaagaaattaaatctattcctttagaatcatctgttgaatcaactggtttcattgaaattgagggaaatacgtatctctatacaggtggggaaaattgcgttttatacatatgggattttaaatcagagtcattatttgctaaaactaaagcaccacttgaaacaactgaagagttatccattagtgaagttgttccattatacaaagatgctgagaaacttttattagtattgtccgatcaatctatattggatattgatttttcaatagatttcagtgaaaatacaactataatcccagtttctagaattatggcgggtaatcatggtaccattgcagatttgaaatatgttggtccaaataaagatttaatagcattagcaacaaactcaccagctttaagaatagttgatttatacaatacaccttttgatatggatttatatgaaggtcacacggatttattgaacatgcttgatgtatcggttgatggtaaatggttagctaccgcatctaaggataatactgctagattatggaaatatgatgacgatacagagaaatttatttgttatgccgtctttgaaggtcatgcagcttcagttacagctgttggtttaccacaaacaccaattgatacttatcctaaattcttaattactgcttcagaagatttaactattaagaaatggtcaataccgaaaagtcaatcagaaactccagcagttgttaaagtatcagattatacaagaaaggcacatgataaaatgattcatgctataaatatcagtccaaacaatgatttcattgcaactgcaagtcatgataaaactgccaaaatttgggatttacaaaatggggaaacattacatattctccgtggacataaaagagctgtttatgatatttcattctgccattatgatagattaattgttacagcatcaggggatcaaactgctagagtttggaatttagaggatgcttcatgtgttagaagttttgaaggatcttcaaatgcagttcaaagagttgcatttttatctaaaaatcaatatattattggtgcaggtgctgatggtttaatcaaaatatgggaagttagtacaggtgaatgtgttaataccttagataatcatgataatagaatttgggcattaggtataaaggataatggtgatgaatttatatcagcagatgcagatgcagctataactatatggcaagataatacaagtgaagctaatgctgaaaaggaattagctagaaaagttgaaattgaaaaagatcaagaacttagaaattgtattgcacatggtaattgggttgaagcatttatgttggcattagatcttaatcatccaatgagactttataatgtgttaaaggaatgtattgctcaaaataaagattcagattcaacaattggatcattagaattagaggaattgatcggtactttagaagatgataaaattttattgttgtttaagagaattagagattggaatactaatgctagattttttgaagtttctcaaaaagttatcagagtcattcttgatcagtgtgatttagaaaaactttatcaaataaagggtattatgcaatatattgatgcaattattccttattctgaaagacattataatagatttgatggattaattgaacaaagttatatattagattatgtgtccagaaaaatggatgatttatctgcttaagataataagtgtagttataaatcttagagttatagatagatcttgtatattcttatagaaatagttaattgaaaacttgttattaataaaagcacttagagaagaaccacacaagcttaacagcgagaaattatatccgaagagacatgaactttttttttcagcagatcttggtttctctataacagtataatattaacattgaattgttcttcttaaagtcatacacaattagctcattctatcgatatgtcgtaccaaaatgagaatgtagcacctagttttagtggaaagaaagtagtaccacaaaaacttgcggaagctactgaaaaatcagattattgggaagaagttattgacattccacaaacatcatggattttcgactttgaagagtttgaaaataatacaccgtcaagaaagaagggtataagttttactgatgaaataactaaacgtgttaaaggtataacttttatttttaattgttgtaagcaactacgattatcaagatctgtaggattaactgctgcaacatgttttcatcgtttttatatgtgtgacgatctcatgaaatatcattattttgaagttgccggtacagctctttttgttgcatgtaaatctgaggagtgtcgaaggagtcttaaagatgttgtgaaagtttgtgcaagagttgcatcaggtaaacctgatgtaattgatgaagaatcaaaagtttactggagatggaaagatttgatggtgaaacttgaagagaccatgcttttccatttaaattttgaagttacaccattaaatcaatataaattatcaatggatgcacttaagataatggatatagtagaggaacaaaactcaattagtcaagaattaaatgaaaaagcaaagaaattatttggtcattgtacttatttgtttgaactatttgcaagaattccaatatgtctattatattcaactaattgtatttgtgcattagtattggtccttgcatgtaaaaaatttgacgaatcccttccaacagaatttatacgaaaagaatttgatacatcagttgaagatattatcaagtgttatgattcagtgatgttactttcattagaagtagaatcattagataagtatttcagaatattacaatttatcccacgagctactaaggatgatatcaatgaaattttcactggtaagggagaaaatcccttttgatagaaatttatattgaagagaatggtatattgttgccctgttcaatatactgttttgattcatgatattctttccagtttttctttgcctcctctattatacttggtcaattggtaaccactttgttaatacaatatgtctatcgcatctcctgtttccaatattaataacgtatgtatagtaatttctttacatgagatttatactaaaaaacagaactaatcaatactaacaattttcaactttttattacatgtagtttactgctgaagaaatccgccaaagaaagtttttgaaacgtggattacaattatctattttagtagtaggtgaatgtggtacaggtaaatcaacattcatcaattcattatgcgatgaggatattgttccaactaatagagcagcaccagctgaattaatgttagaggaacacacagctagaatttatgaagggggtactcaaatttcaatggatattacaattgcacccggatttggtgattttatagataataaattatcaacagaaaaagttgttgaatttattgataatcaatttgaaaaaatgttgagtgaagaatgtagaattcaaagaaataccaaatcaaaggatactagaattcatgcagtattatatttcattagaccaacaggcaaaggattaagagaacttgatattcattgtttaaaatctttaaataataaatgtaatattattccaatcatgtcaaaggctgatttattaacaaatgaagaaagggaaataaatagaaagttaattatggaggatattgttaagaatgatattaatatttatgatttttcatcatgttttgatgatgttattgaatcacagaatgaaagtattatggatttagtaccatttgcaattgtttcaggtaccgaaagaaaaattattgatcaagttgaacataaagttagagttgtaccacatggtgttattgaaattgataatcctgaacattctgattttatgattttaagaacttgtttattaggtgcttgtcttcaagatttaaaggaaatgacgcataatgtttattatgaaaaatatcgtactgatatgttaacaagagccaatgttctcggtgttgtgaataaagaaccggaaacatctaacaatatcatttccagaatatctaattccagtaatgttatctaaaaaaattgcttgtgtaaatgagtttataaggaattgctagttaattaatcgataataatagaatagatctctcaaaagattacgtaatattttacaaaataaatttcagtgatgaatcaattgatctatgaattgacgtgtttgaagattcgtagctctttatttagatgatacaatacgtgttgaataacaacgatgctatcaaaagaagacttacacgagcttactttacaatgtcgatataaagaaagagaattattagaaataagtgaactagtttcaccagatcttaatgaaagaaagcaatcaataatcattgaaggaatgccttcaagtggtaaaacatttacaattactaaatatcttgaaaaaatgtatgaaaagtataacacaagttatattaacattaaatgtaaattttgtcattcgcagagagatgtgctacgacaaattcaaaaatcactattaatacattatggattagcatatagtaatgttgaaaaaagaatgacagtttgtaataatttggacagtttccccaattgtttatctacaatgattgatcatacagagaagataaagcccgttattatagtattagatggaattgatgagttaccggagaatgaacgtagtggaatgttagttgctgcattatctaaatttcacgagttaggagaagttggatttgatacattatcatttataagtgttgttactagagctgaatttttgggtattgaaacttttaatatacctattgtctcgtttgactgttataatatggaccaatttaagaatattttatgtgatttacttttagagaaattttggagtttgtatgatagtaaaaacgaggttgggtcagggagtgatgatagtgatacggaagattatgaaactagtggtgagaatggtggaattagtgacaaaaaggaagttaaaattgatgagacgaagataattacggaaaatgaaaaaagatcatttttcatacagtttgtggatataatattacaaacacataaaaaatatattccactatgtattgatattgttgtaccaattttgaaaaaagcatggccattatttattgatccattattgaaaactaaatcaattattaaaggtagaaatgatgttttcagtacatttatgaaaaacaagaaattattgagtgaagaatttgcaattgtaaataaaattaataacacagcaactacattattagattttcaaaaatccgatacgaatataattaacaatgataaagcaataaataacattgataataaaggattttatgatttaagtgataaaaccaaatatttaataattgcatcatatttagcatcatataatgaacccaaatttgatagacaatttttcagtaaaactggtgattataataatatcttaaaacgtcgaaagaggagaatagttattaatgataaaggtattggtagaatgagaaggaaaaccaaagctgcaatggcatttacgcttgaaagattattatcaattttaaatgctatatgggtagaaaatgttggtgatgataaattaattaataatgttgaactaattgcagaaattggtactttatcaacactgaaaactttaattaagacaaataaaggtaaaatgagtagatggaaatgtaatgttgattggaaagttgttaagaaattttcagatgatgtaggttttgaaatttataattatctacaggattaatatagtttttatataaatggatttaccacatattatcttcttgaccatttatttgagttgttggtatttcaccagctatttccttacaattattttcaatttctggataaaacgatttttcacctaactgagagaataaaattttactctttgaacgtatagttttaatattcttttcataaatatcgacatcttcaggtgtattcgttacatttattagggaatctttataaaattcatttattaacgataaaatatttgataatgaggataaatatttttcaatttttggattatcatctttattttcctttgatagtttagcattattaatttccattaataaatttgaagcttttttcaaagcacctattagtataaatctttggaaacctgtttgaatacctaataattttccatcacggaaagaatgttcttcaccaattttgaatgcttcatcataactttcttgataaaatgattcctctaaatttaacagggaatcaaaatcaatctctagatcttgagttgtatttttaggagatttgggtattatatctgacattattattgtgggtgatgtaaataaagcgaatataatctacaatttgtaatcactaaggtcttaaaccattcacaggaataaatttgattatgtaattattttttttgacatgaagatttagttatttagtagtcacctagggcgcgtttacattcagtaagactgagtttattttcttcttttttgataatgaaaaggaaacaagaggaagtagaggatagtagtgaagaagaaaataatgaagtaagtgaaaccgaagaagataatgaagaagaaggtaataatggaatcgaggataagattttagatgttttagttggaaaagatgaagatagtagtagtgaatcagatggtgaaaatagtgaaggtgaaattgttaataaattttatgaggaatacgacgatgcgacggtggagtgtgcacgtgaggcggaggctcagcgacttaaaaacataaaggaaattgaagaaaatagagataaagaaggggataaaggtgatgatgataataaagtaacagaagctatcaattctataattaatataatggatgaagatagagaaggtgaaacagttggtagtgcgattcaacgaattcaaagacaattattacaagagaagaagagattgaaaataccaagaagtaaattaagacaaccattgaatgggtcacctttacaggataaagttgatttggcatcgaatgcgttgatggtattaatgaatagtgatagtgatagtaataatgatgtaactaatttgactattaatgagttacgtaatatgttataataatattacggataagtgggatgttgattatgtaacaatatcggaaacccggagagatcaaaaaataacaaataaaatgatcaaatttaattaattaatcaaatcagtgaatcataataatctcttatcagggacatccgggtgtttattaattaagttattaagtttttgagtaaattattatttaacctttccccggattccggtattctatatccgtccggggttaaggatcctatatactcaaagatgtgtcattaactgttgatgattaattaatcattctatcctaactttatttaacttttgacagttgaatataaaaagatagggtcttcccacccttcccatccattttattatttctttatctttctcatatgtactgttattatctcttttgaacatcgattaatccataacaactaatcaacaattaatatataacaaaaacatgtcacctatttcaatcttatctcttaatcttgcagcaaaaaatatgattaaattacaatcaaagacaacaaaatcttttatctcttatactactcaacttagatctgcacataatgaacaaacttattatgcttcacaatctgctttatataatcaacctttaaagactcaagtttcaaataatgcaggtggtcaaattgaaagttctgaaatgacttttgttaaaaattctcataattctcatacttcaacttctgatgaagacgatgctgattttgttccaagtgtttcatctgaagataaagttagtggccatggtcattcaaaaatctaaatttagtatttaatacttatgataattagttatatgatttggttggttcattttcttgattaatcttatggaaatctggttatttccgttgacaaaacaaaaaaaaaaattatcctttgtcattatactgagactgttgtgataatattactatattatacctttttgattctttttacctactactttactcttatgaaatctttactctactattattatctctctatatttatttcctcagtgcattttatttttattttcaattctttatattttttaatatatttcatgcctcttgctttactaagatttttacatataactaatagttttttaattattattttataaaaaattaaaatattctaataattaataataacccccaaaaccacctctattaacaagtacattctcaaatttttttacattaacataacctccacttattgattgtctaacattacgagcaaattgatcaggaaattttgctaaatcatcagctgcatccttatttaatggatcattaggatttggatgtaaaaataaatgtaaaatacctgcaaatattaattgtaatgttaatgtaggtttccaatcatttcttaaaatatttaaacatacatgtccattaatatcaatatttggatgataaattttattaaaacatttaaattctggtgcattatttggatagttatttggtatattacattcaaatttaaatttcccacctttataaaatccttcatctggtttgattattaattcaatcttcattggattatttcgttcataaaaaattgaaattgatggtatttcctcatattcttgtaaatctcttttagcacgtataaatgcaacactactgatattattattattattattattattattattactattgttactgtgattattaccattactgtttaatgtttcattcgccttagctttagctttagcttcttgtagtttctttaaacgaatcatgttatttggtatttgtatttactgtccttgtcgttatatatagttacccacattaaaagattgtctgaattaaaccacagtaaaagcgaatttaataaattttgtagatcgtattatgtaatcacaaaatttgttgatgttttcttttttcttctttttgatgatctgaaattgatgcccctttttcattttgtttatgttttttttgccttttatatctatttctttgaaacatcgcaattattatggaaatggatgaaacggatgagaatcattccggcttttatacggcaccaagttcaatgcgtttaaatcatcaatttaactcattaagtcaacaacttaatccaaataattcatatgcttcatcaaatgaaaattcaagtataactgaatcaagttcaatttcaagttcaaatgatgaatctgattatgaatctgatgttgaggatgatgccatgttttttggtaataatagagcattgcagtcagttaatgatttaaacgaatcatataatgaaagtttacatagcaatgaagaagatgatttaataacaggtgttaatgatggactgttaggtttttcaagagttttggctaaagaaaaagatatattacagaaagaattagattctttcaaagaagagaacgcagacttacttaatcaaatcaataatttaaaacttacatctgagaaatcaagtcaacgttatgaagatataaaagatgaattacttgcttctgaaaataaattaaatgagaattctaaaatgattcaaaaatatgaaaataaaattaaatcattatgtgatgatttatctagttcaaaatctgaaattattaaattaaataaaactgttaaagaaatcagtgataataaagaagatattttaaaatcaaatgaagctcaagttcgaaaattaaaaagtcaaattgatgaattgaaaaatttaaatgattcatttgaaaaagaaattggaattcaaaccgaacaaattttagagctgaaaaatcaaattaaagatttaaaatcagagattaacaatctgaaagttgccaaaattgatggaaacgttaatcatgatgataaagaaacatcatttattgatgattctattttaattgatgaattccctcaactaaatgttaaagaattcaatgaaatccaatcagataaacttaaaatgaaaataaagcaactgaattcatatataagagctatcaaagataaaaatgaaaaaattgatttagatttaaaaagttatcaaaaatctgaatttattagaaaactgagttttgataattcaaaagaaattgataactcttttgatgaaatggatgtctcaattcatttctctgatgatgatgaacaaaatgaaagtgttttagataccaaaaataacaataatacatcattctccgcaaactattttaccccataatattgatttaaatggtagtacaccaatctcttctagaaaaccgtcaatctcaactcccacaaaacctcattacacattgcttgtacctaaaactattttgaataatgaatttgtttttgataaattagatttgaatgaataccatactattaacttatctgaaactaatattacaaaattaagccttcaaccacaaaatcaattatcttatttgaactataatatagtatcaaatgattttgtcaataatttaaacaaagagattaaagaattgaaaaataaagttgaaaatcctaatttatcagctttaaaggaaaaacataacctaattgactcttcagcattagatatttcacgtaaggctcatgaagctacatgttctatgctagaagtaaaaattgaggaattacaaaagaagattgataaaccggatgttgaatatataaaaactaaatgtcatgaaaaaagttttgaaatgatttcatctttagagttggagaagatgaagaaatcaaaagaaaatgaagttaatcaacttaaacaaaaattgagtgttttgaatactacatttgaatcaccttcaaaagagtacttattatcgcatgctagtgaccataaactagtaatggtagatgaggatcaattcaaaactactgaagaaactatcaagagtttgacgaacttattagaagaaagaaataatgatctggaattcttcaaaaataacttaacctcattgcaaaatcaacttgacttcccatctattgaatacttaacagaaaaggcgaaattgaagaaatgtaccgttattactgacgatgacctctccaacctgaaatctaccaagactagtctttgaatccagattaaatgatgctaatgattatattgaaattatattgagtacgaaatcaaaacttgaaactgataaaactgaattagaaaataaaatattagagctggaaaataaatgtaccaagcttcatgaacttaatgaaaatccaactttaaagtatttagaattgaaatctaattcacttgatttcctgcttctttcacgtacctctcatcaggctgaagtttctaaatcagagttttactctaaacaaaatgaaaatctaatttctgaaaataaaaagctgaaacaaaaaattgataagcctgagtttaattatatttcagaaaaattattacaattatacaattatagatgtatttctaatgaagaatttaattccattaataacgaaaaatctgatattgctcttaagttggatacttccaacaaattaaatcaaacacttcaagaaaaaattgacagcaatgtctccgaaattggtgttttgaactcaaaaatagttcttttagaaaatgaaattgtgaatctaactgctaagtatgaaactaaacaaactagctacaatgatttgaggaacagattagattctccatcaattggttacttgaaagagaaatgcaccaatcaagattttgttctcttgaagacagaagaatataagaatctacaaactgatattaagtttgctaatgaacaattacaaaaaagtaatgatgaattagaacataccaaacaattgaaaatttcactggagaaggagtttagagataatgttaacaatacagttgcagcatcattatttgatgctactaagtctgaattggaagacgctaagttggaaatcttgtctcaggaaaataagttgaaagaattagattttattaaatctgaactgattgatgccaaatcacagattggtgcccaaattattaaattgaaagacttagattcaactaaattggagatggaagatgcaaaaacacaaattgagacgcaaaattttaaattaaaggaattcattttaacgaaatcgaaattaaccaatgctaaatcagaaattgaaaatcaaaaaattgaattgcaacaattagattcaactaaagcagagctggaaacaaagttagaagaagctttaaataagatcaagttgaaagaatcagaattagatacaacttcagccaaggtagagtcattggagataattaaagataaattaaaggagaagagtgcgcagctcgaagatgtggaaaccgataagattcaattgcaaaatgaaattcattcactcgaaggaattagggaaaaactggcagaatcagagaataaagttgtttctttaaatgaaaaactggttaatttgaacaatactcacgaaaaacctagtgttgagtatttaacagaaaaagctattgaacaaaataaagttttattaactactgaagaaaaggcaaacttggttactaatctgaaagaggttagttccaaaaatgtaaatttaatcaatttaaaggaaactctggagaatcaagttaaggagcatgaaacagagatcaattctttaaaaatcaatattcagaatctcaaaagagaaaatactgatttaatcaaacaattagaggaagtgaagtctttacaaaataacccaactgttgactacatcaaatctaaatcaactactttggaactggttgcaattccaattaaacaacattctgaactaaaattaaacaatcaaaagcaaacatcaatgatacaaactcataaggaggaagctattaaacttaaaaagtcactagcagaagctaaaacagccattgacaatccaaacttagaatttttggaagctaaattaaagaattttgattgcattcctgttaagaataaagaattagaagaattcaaattggctaaacttgaagttgataaacactctaagattcaaaagcaaaatgctgaaaaaatcaatattctagaaactaaagttgctgaaaaagaaaaacaaatagatgagttaaatcatttgaaaattgaagtatctaccaaacaagctgaacttgacaaaactttatctcaacttgatcaagcggtttcactttataatgaaccatctgttcaatatctgatttctaaattagattcaaattcttataaaacaatgcctgcagcggaatacaccaagattgatgaaggtatcaaaggtttagaaaagaaacttgaagattgtaataaaaacttgggtgaaaaatcaagtctattggaatcacttaaattagaattagaaaatactaaagtcgattatgaagctcaaatcaaattattaaaggaagaggcgttaaacaaacaaagctctgctcctatctctgctataaaatacactaatgaaaataatattgattcacactctattgctgctgttaaatctgaagatgaaaatacttcagagttacaagtacaacatcttaaagatctggcctctaaacatggttatgctataatttcatcacaagatttctctacattaattgaatataaaaataagtttgaaaacgtggaaacaaagtcatttgaagaacttagcgaaaagatcaagcaagcagaagaaaaggttcatttattgaccaaagaaatagagactttagaaaaacaagtagaaacagattcaactgacaaaggtggaaaatcaaaaaactcaaaatcaaagaaagaattaaatacacaacttgaatcaaagaaaaaagctttaaaatctgaaagtgatattcttacagagttatacgacaagctgaaaaaactcaaaactatcgagtcacctcacattaacaatgttgatgcagaagaaattaccaccttgaaaaaagaacttgctcaacttcaaaataagtatgaatctaagaacaatgaaatggagcttttaaaatcaaaaatgaatgaaacttctgaacctagggttttggctgatgtattgagcttacttggatattcaataagaacaccagataaaacgcatattcaattaggatctattaagttgcataaacaaaatattaaacttaaatcagttgtagataacaagtggtataattctgctgatggtgtatttgatattgatagattgattagtgaagaaaaatacttattattgaataatcaagaattgaaacaaaaatgtgatctaatgctcaaatctatgaaaacagatgaaattaagaaactaatgataaattcagacatggttgttttacaaaaggctgaatatcaaactttgaatgaagctataaatcaaaaggatgatgttccatcaactttgacattacaagatttgaaaaaacatgctgatatattagatatagtaacaatgaccaaatctgaagctgaaaatttgaagaattcaaaaataacttcatccatgctaactgataaagcaaatgagctgggtatggttctatttacaaaggaagaggttcaaaaattagaaactaagaaaccagtcaccaaagaaaatattgttgcaaaagctaaagaatttgacttattatgtatttctaaatcaagatatgttgcaacttcaattgctagaactccagatgttgatcatgttaaagttgttccaaatagttactatagtatccttgtcaatagtcatgcatggtttaaaaataataaaagatcaatttcaaccccaaccagacctgaaactattacagaaaatgacaatactgaggttgcatcattttcaccttctaatattactcaaacattcagcaccaaagataatcaactgcatttaccagctaaagtggatgaagctgatttaatgtcattaaattcagttgctacagaaatctccaataaggctgaaatacgtgctgcaattactaaaactgttattggtgaaacactgtataaatattacagaaaactgggacctctttcaaatgtttcagatacaagacacccgaaatatttttggattcatgcacatacatgtacattatattgggcaaagtctaatcctgttttatcaccagatggtaaaaagacaatcaaatcagctaaaatttatggtattacttcagttgatgataagaatccacttccagttggtctgtattataaaacgttagttttgaaaacaagcagtaaaacaatgagaattacttgtccaactagacaaattcataatatttggtataatgcaataatttatttattagagagatccacagataatttaattaatgatacaaattttgaaaatcaatatgaacaagatttttcattagatagaaaaactgctcttgaaagaacacaatcacaatctgttagacaacacagtcttcgtcattcaccaagtatgagaaataatagctttagaatcaatcattcacaatctacgagatcaatgcgtagtattagataaatatatatattatatatataatcgttaataaattgtgtagatattatttagaattatatattaaaaaatgtaaaataaatcttgctacaaaagtaaattgtaaattatgacattaatttattatgttaagtagtattataaagaaaaaaggatataaaataaacggataaaaattcaaattggtcaatagttaaatggtattttcattaaaatgaacatggaatgtaaatggtttaattaatatttagttaaaattgaagttatatattgtttaactaattctctttcttattatagaatggatttaataaagaaactgttaaacatggtaatgacataccaatttcagctcttaaaaggattggaactttctttaataacccaatatcttgaatataatcatcaccattaatagttgttgataaaggtttaatataaggatctaatgcattttccccttcttcaggttgcaaaacttcaacttttggtgcctttaaatttaattttgttaataattttgacatttcaggacttaataaacttgaaccatccgaattttttgaagtttcttgtttctttgcagcatcaagtgatgaaactctaaatttatttttaattgatgatctatatgataatggttcattttcatcttctggaatatatgttgctgaatcaacatttggttcccaaaataatctcaaaactttattaaatctatcaaattctgccttctttaatggtaattgatcaccatgaactcttttctcaataccaaattctggtaaataaacatcaaatgcagattcataaacttgtaaaacaataccagtacataaaacttcccctgtttgtgcactcatatcattgatagtttgtgaaagtaataaatgaatagcttgactttgagtttcacttgcacaatctttcttaaagttacaataatcacttaagacttttaatgattcaacatcttcattatattcagcaacattatttttaataacagcctttaattgtctatgaacaataatatcagcatatcttcttaatggagcattaaaatgtgtgtatgttggtaaattaaataagtaatgaagtaattcttgctctaatttacctgcaataatatatttacctcttcccatacacttaactaatatagtttcaacagctgctcttttgattggatcatcaatacttaaaatagagttttggaaactacctgcactgcttgtgtctaaattaacacctaattgtgaaactttttcttgataatattcaaatttatttaatgttgggattgaaaactttcttaaaaatgcacgatcgcctaaaactgaatgaactttttgagcaacagctgaattaaccgtatgaaatatttcatcaaaaacaaatgagagtaatgaatcatcataaatattcagacttaatttaacattttcatcatctagttgatttaataatggtaaagtatattcagtatttaaatttggattattcaaacgctttttctttaatcttgaagagatcaatttaagtgatgcaaaataacttgagattgcactatcatcattacctgcatttttcaaaattttatcaatttcctcataattaattctcttagttggttgaacggtagtttcacccatccaaacattttcgatttcaaatgaaattgaatcaatttcaaaaacaactgataatgctggtgattttgaacctgtcttaaatgaaatcaattcattaacatgatctggaaataaattaacacttttttgaggtaagaaaacaccatgtgatcttttcttagcacgtttatcaatatttgaaccatcaatgacatattcactaacatcaacaatatgaacacctaactcaattttattatttgcgatacctttaacatggaatgcatgatcacaaaataatccattttgagaacatgcaataatataatcatcagcaaattctcttctattagaattagacaaaatatattcagttgatgggaaatttaacatatatttttcttcaccatcaatatattcatcgcacataaaattattatctcttaaaattgattcaacttcaacagctttatcatcggttgtacctaatcttgaaactaaagtaccgaatggatgtaatgaagtgattggccatcttttaatggatgcaataaatgtttgattagcatatttttcatgattctctacaaaatcttttggagcctgttcagttggaattgcaattaatggaactttcttatctataggtttaaaccaaacaattttaggtttataattgtttttattgttgttattattactttctttatctttacctttttctttttctttttcctttttagcagcttgtgaaggtcttaataaacctaaagtaccagaaaaaagttgacctggaatacgatcaataacagcaacaacgtgaccagcatataaaggtttagcatcatctgtaatttcttcttcttcaactaaaagtaaagattgaccttcaacttcaacatcatcgttcttcttttgaattggtctttgctttaatgagccttttctgttaagcgaggagttattattatttgaactactattaaattgatcattatttgatgaagtacttgcatcgttatgaacatcatcattaagatcaatattaacctttgaatcttttcttctctttttttcttccttttcacgttttgaagaccaaacttcatcaacaattaataattcaactgcaaccaaatcgccttctaaagctctattacgatcttttgaaccacaaatgaaaatatctgcatcaagtaaaccatcagttgaaacataagcatctgatctattttttttattaactcttaaaatacccgtaactaattttccttcatttattaaatcgggtaatgaactttgaggtaaataaggagcaaaaagtgattttctttgatttggattattagcacctccgttaaattgtgaaatcgaagagattgaaccaccataagaattttttgaacgatgacctggtaaaaagcttggagattcaaaactcatggaattggtgtgattatgattattgtgattattgggtggtgaaggagtttgcggactctttctccaatttgaattcaaatcagaaccagtacttctatgacctaaatttgaattattttgatatctatcagcaaatgaaggttgaggaggttgtagagtttgagaatgagaatgatctcttggagggaattggaaacctctttgaggagatttgtctgaaacaattgatctatttcttgaatgagatggggaatttctataaccgaaagaatcattatcattattttgaggagttgccgggaatttaaaagctggaggatttaacatatttggagaactagttaaatcataaagatttgaatcattgtgagtgttacttgattgagctgaaattgataatttagaaggagagttatatctttgagcatgtgcttcagctgctgcctttttagcttctgccaaacctaatgagtgtcttcttgtatgacctaaagcttgaggtctagagtcagttttagagaaaggaatacttccaattgaggtgacagatgattgagatcttctatgacttcttggagatgaataattattagaggaggaaacattactatctaattgatcttgataatttaaagttgaagcagatcttctgtgataattggaaggagaattagttttaatattagcatttgcgtttgtatttgtatttgaagtagaagcgtaagtagttgtaataagtggtggaggttgaagacttgggaaattttgattttgattattgattgattgttgttgagcttgttgagcttgttgttgtaaaatttgttgttgttgagcttgaacaacttctaattgacgttgtaaactcaattgttccactataataaaaaaatttgaaaagagaatgttagtataatgttttaaaaaattgggacaataaagttaaaaagtacatacgcatcaatgtagttaattctgaaggagatcttctatgtgcaacatgtaaagttcttggtttatcaccagttgtttgaatgattgattgttgatataaatcattttggtttaaattattcaaatcattggattcatttgaagtattattaatattatttaaagtattaaaactgtttaaatttttgtaattatccatattggaattttattatactaataatgaaattttatatgttgactgtatgttttttttttctttttcttttatatgttggtttaataataagatatattagagaatgtaaatattaaatttagtttgtaaagtatgtttgcttcttttattattttgatgtcaactgaattaaaataaaaagggaatgatttaattttattataagctattaatagcaattgagtattaataagtcgatataaaacttaatatagtaaatgataatgataagtcttgatgtgattgactaattgctatcaactaataaccaattgagctagtgtaagaaggagagcaaacgacaaaaaggatggatatatgtagaagtgtaatttagctatttattcacacttcttaataatataaatttaaagaatgaactttcctttttttttgtaaattaaagtatgattattatataataaaaaattgaaatgataattaaatattataacaattgaaatattacaatggcagtaattggggacgtggagatacttgtaatagagggaatatagataaataaatacaagataagagggaagagagggaagagatggaataggcagacaatgagccccaggagggcgttcggtctcgaactcataaaaaaaagagggaaaatttgacaatttgacactaaaataaaataaaataaaattgacactcactctcacagtgaacattaaattaaattaaaattaaaactaaaaaaattgatggatctctctaatagcaaaacttaaattagcaattacccctgtgagcaattaataaatttaaataaaatcattgtgtcgtcccatcgtcgctgcttggaagacgcgctacatgaaaattgaaatttctcgaaattttgtgattttgtgattttgagattgaaattttgaagttggaaaaaataatatgccgtcaacagaaaggtgagaacccacttcgaaacatagtgtacaggattatcaaattatccgtatttcagatttaccctttactacaatatattagagtcattctaatacatagaatcatattcatcaataatcacacgtttttttaatataggtatgtatcctctatatcactatttctccttagttttccataattgttactctaaatcagcaatatcttcaccaatttcaattttaaacatcctgatcaaaattccgtattttattgaatatttcaatatacatatgacgtagtatgattgtttcaaataaaaggatatttatactaacattaccctgctacttctctcttattagttttaaatgtcaactataacaataaatgatttaaactcaacaacgagccccacacgtaataataatggttttactaaaaaaaataatgaaaaaaaattattattgaaaaataaaaattatcaatatcaatataccaaaatgaatgttgatttatcattaattaatgatttatcaaataatttaaatccaaatgactattttaatgaagaaattttatatcattattgtaatttaattcttgataaatattataatactaataatcaaaacgataatgataatggttatagtgaaacacatcaaaatatcgcattgtttagaaactactccagttacggtccaaaagctaaaaatattgatatttatttacatccatttttatggaaaaaagaatggcatttagctattggttttaataaatataataaaattttattaattgattgttcaaattttaaaatttcaaattataatcaaaataatgaaaaggatgaaaatattgataatattgaaaataatcaaaataaggaaattatatacccttcatttccaactaaaacttctttaagagttgagcaatttatttgtttctttaaaaggaaactttcaaaacattctttaaaatatccaagattatataccgacctatttgaacctgcaactccttataattcaattaatttattaacaattgtattcagtttttgtttagatgctgtatcattaactagaagtttttgtgatcctgaattttctccaagaaaatttgatatatctgatatacatcctctgttagataatttaaatcatttatttatagaagagttagcttcaaaggaaagagaaattgaaaaattagctaaagtaaaacaattagaggaacaacgattgaaagaaaaaaaattaaaacaggaagcaaaggacagagagaaacaagaaaaaagagagagggagttggaaagagcggaaagagtaaggaaacttaaattattagaggaaaagcaaaaactgcaaagagaaaaggaagaaagagaagaaagagaaagaaaagagaaagaaagaatagaaaaggaaaaattagagaaagaaagaataaaacgtttaaatgaattaaaaatattggaagagagtaaaagaatagaaaatgaacgaaaactgaaagaacaaaaaaagtttgatgaaattcaaaacctggaaaagataaagcaattagaaatcatcaaacaaaatgaacaaagggggaagatcaaaaaacaaaaagaattgaaagaattgaaagaacttaatgaacaagaactaaaagataaagcaataaaagataagatagaattattaaataatgcacgtaaaagagaggttgacctctcacctccagttgaagacaaaaataatgaatttatggttgataacatagctaaaagacaaaaatatatgccaagaactagaggtacaatatttacaccaattgaaataaatgatttggatgatgcagacgatgatgatgatgatgatgaaaatgttgatgatgcagaagacataaatgatatccatattaaaaacgaaactgaaatgtcagttacaccaaaattgaagataaataataaaagtatagctcaaattaaatctacgacttcaacttcaaaggataaacgtattttaaaactctcattaatatttgaaaaaagaattgcaatagcctttcaaaaacatttacaaaattcagaactttttggtagcaatattaaacttgatttaatgtttgagtttattcaaaacttggttaatgatccattgacaaattcttcacttctattaaatccaaattcaaatactaataatacgtatgatatcaaaccatgtttgttagtcaattataaaagaagaatgaaacaagaattcaatgaagaaagatgtttagaaattttgaaaaaagattcattaaatcaaattattccacttgtttttgaaaatggtagtatattcttaatcaatattaaaactaatgataaattcaattgtattgttaaattaatttgtgtttcaaatagatcaagtagatcggaaagagaaattatgaaaaattatgcatttagaagattaattgaactttatgttggaaaatataagagattgaattattaaaattagatcatctatcatattagtgaaaacgccatcattttacaaattagcaatgcaatcaatatttgctattcatcatatattatggaagggtaaatttgatatgatgtttaatccgaaaattgaaatattagataattacgttgcattttttgaaaatataatgaaatgtacagtagagaatgatatgtttaaagctgaacttaattttaaaaggcttacaaaacatattattggtgaatcataaattttgtaaaatataataatttcaaaataaataataaatttttataattacaatgtaatagacgatttatcgaataaatattttttttgaatttataacagtattataccatatacatatatcttttatgagtaaggaatctatttaatgaaaacttcagcaccaccagttaaaacatcattaatttcaacatcattaagtggtgtgtatctaaatcttttggaaagattgtttcttgattggaaagaagctgcatgacctgaagttggagcagatacaattgcactaggttttaatccagctggtgcacatgggtggaaagacacaggtgtgtgggctatacgaatgtaattattgatgttagtatccatgttgtaaaatatagtgattccttaatcaaaaaaaaagttcttttataattgatacttactagcaacgtgtggaccccctacaaatttaatcaaagggacatgttgtaatactcttaaagtagccttcattgttattcgggtgttggaacgttaaataaaggtttatctgaagttgaattattaaatcaacatattgtaatcaatataattcatgttaacaaaacgccatattaaacatcttccccgtataaccgagttcgactccgggggtaaaaaaattaataggtaagtatattagtcgggtcgatcacgtgatatttttattttaaaattacgtaatgatttttaataacatgaatttcataatctcagggattagagaatttgccctcagttcaggttatatagaagagagttgtaagttaaaataaaaccgtgttattttattcaattgactaaatagagtattaaacaataggcaatgaatcacgatcctttccattggggtagaccatctaccaaaacttacggtgagtataattatttaatctccaatgcatcaaatattgatagaagtgtaaaaagtaattctgaattcccaaaaatgcatacacaacaaccaatgattacaggtacatccgttattgcgattaaatataaggatggtataataatggcagcagatcatatgggttcatatggctcattaatgaaattagaagatttaaagagaataatacaagttggtgatgatgcagtcgttggaatttccggtgatattagtgatttccaatatttagaaagattattagatgatttacaaattgaagatgcatatgatatggatcaagaacatttaaaggcaaatcatttatctgaatatttaactagagtaatgtataatagaagaacaaagatgaatccactttggaatgctattatagttgcaggctttgatgataaagatgaaccatatcttaagcatattgatttattaggtgtttcatatacttctccaactttagctacaggttttggtaatcatttagcaattccacttttaagaaagaaagttgaaactgaagatgatgtaaaaaaactttcaaaggaagatgcaattcaaactataaaagattgtatgaaagttttattttatagagatgctagatcctggaataaatattctctttgtgttattgaaaaatcaactaaatcaatttcacttgaacatgaagttcaagttgaaaatatgaaatgggattttgctcaacatattacaggttatggtgttccacaattataaatacttttgtaactatttttaagaataataaataattatacataaagaagtcattgatcacatcgtaactacaagaactacagtaatttacattttataaaataataagctatgaatttatatttttaatactatacaattaaagatatgccagataacgcaatggaaaagttaattcctagattatgaacagtattcaactcgtttaatttggatagtattaactgccttggatttatatcctctaaagtttccttgacatgaataataatgacatttaaatcctttaatggttgaaaaattgaagatttatagtaatcatcatcataagggtaatgtttgatctatctgtttaccaggatgtttattcttcaaatcaatacatatttttctaagatttaacatttcgtaaattaaatttgaaggtgtcaggtgaccaaaaagtggaggtggcatatcagttgttgaacattctattatacatgtatttaatttatcttcattaattaaatgtgagacattattccagataattgaattataattagtatttgaggataaatcagattctacatctccaaagaataaaacattgtagtcgtgaagtttatcctttattagaaatgctgtactaaagtacctatcattgttaatcaaatgcattccgtgactaactttgaacaatgacaatgcatatctatcagataaatcgttatgaatcacattctcttccaatatattcaaggaaattaatccaagtgaaacaaggtctggccaaacagagtcattaaatagattattccgaatagaagtcatagtttctgaaattccgaaaactttcttgggttttttaaatgctggtgagtttatcaccaaacttgaaacatgatcaaggtgtgaatgtgttataaaataaccatttatggagtttagtattctatgggctatttggaaattggttaaacttcctgtagattcatcaagatcgacacaattatctaataacgactgttttatattactaaatggtatctttatatccatgttatcagtgcatatgaatttactcatacaattgacaagtttatccatattatcaaaagttttagggtacaattccactaaaaatgaagatttcaaataatctaatttatttttctcttcattatctaaaatgtcaaaaatagaagtcagaccagttccggcatcaattgcaagtaagggataatttttgggtccgttatttgtttcaatataatcaacatatgcaacatctgtaggttttagtaaaaatgaacatgttttcccagacaatggaccgcctgaacaacctaatataatcaattcaaagtattttttatttgtaggcatcactgaacttgacttgtgattatctaattgttatattgtagacgtgacacaaccagatgagttgatacagatacggatattaaccaactaattatacatataaaaaatcttaagatatgcaaaaagagcaattagctggttaaaaggaaggaaatttggtttttttaacaaaatagtcgttagagaatgtttaatattgttcaacaaaagggctgggcatcgaagaaaattccattgcagcaacattaaaatagctttttttctacgaagtacattttttcctaattcattctttccaccaagcctgatgaaacatacactataaaaaatactacacctttgaatgacttgtacacatgaaaaaaaggaattcaaagagggtgttactttgtatacataaaaggtaaccctactaaaaagatagatattagtccacccaacaatttgactaacatccaattgtgttataatatgttgatcaccatagaggccgtatcatattttacaaagttgcaaaatttattatataagtactaatacaattggataaagtatcacaacggatattttgccaagtatgattatacaaactaagagcttgatgagtggcaatatatatacggaatctcttcactcaacatgcgtgacggtaagacaagtttctttatccggaagcttttctcagtcaaagctgtgtcaccattattttaaattgaaagattgttaaggatacattaaaacatgtcagctaaattgtttcctaataagttcaaaaaattgttgcatgacaaaacttttggcaaataataaaccaaaatttcgatcgtttttcagatattaaattaatacatcgataaactattatagcatatcaagtatactatggcattgtcacactcaaaaaatgttattttaacttgtattaaatcttgaaactcttaaagaatagaaagcttttttatatttttgaagtaacaatctaacatttttgtgtaaaactgaaagaataacttcagaatgctaatcaatttagttgccaagcctccactgataagaaaaattgaattttaaggtggccgccgcgacgaccccacctttgtagataagctttctggatagggttttcgtcttgctatcatggtaatttatgcttattatattttgtacctgtacgtgttgtcctgttttgcacatgtactttgaagtaatttggttgttaaaacaacattgtcccttctctcttgttacctttactacagcgtaatttccacaaatggaaaatcagaaagcaaaatattatgcgccaaaaaaaaaatattttgtcggcaaaaacataatttgaatcaaaatattgataattcaagaatcattcagtctttttaacatttacaatcagttccaacaccagattcatgactagtgaaggggtgaataagccaaaagcctattgtgaaaagatcgagattaggttgcattaattgtcggaaaagaaaaaagaaatgtgatgagatcaagccgatttgtaccggttgtttaaatcgaaatattgtttgtgaatataagataaatgaaaaagcaattattggtgaattatcttcaaaagaaaatttaatctccaaaaacggatctgaaattgtttctcttaatggaacaaagatatatgataacgtaccggaaaaaataagtaccatttcaagtctacgaagtattgtcggtgacactgtcatgcgtattttagaacataactactcaaatttgaacagcttgtttgataatgatgaaaatattaataacaataacataacattaaacaatgaaaaacataattctaattctgaaaataatacagaaaacttcccgtcattggatgacttattacctattgactcggatttcttaaacattatttttgaagatcaacctcagtatttggatttgttcacaaatccttctccttcgataccccaatctgttgatatcaaattacctgtatcattaacatctgaggaattgggatattttgaattttattgtaaaagcatcttacctaacttatcaattcttccgcaagagttcaactattacacaaaaatatatattccaattgcatttaaagaaaaatcggttttatacacattagtaggttggggctgtcgtatgagaaagaatatcaacttaaattttcaaattgagaataaagaagctgataattacattgaaatggttaatgaaaatataactcaaaatgaattaacattagacagagaaaaattcataacaaattttgtttgttacatgttattagtttgtatggagatatcatttggggatacatctaagtggtcacattattttacatgctgttttaatatgattaataaaatgccaggtaattttagatacttattatctgcatgttctattgaaggtaatttattagctgagaattttgcttattttgatgttttagcatcacaatcaaatgaaaatggtacattttatccaatggcagattatcatgatttgttcagtcaaaataattccaataaaatagtgcatgatcctttccaaggatgtattagaccaataattttgttaataggtgagattgttagtatgttagtagaatatagttctcttcaaataagtttggaattgccagaatgtgataaatatgaagtcattagtaaaatgatgaaacaatctgaagttttagataaatctatacgatttgccaaaccagatttatcatgtcttcagtatcttgacagttctgatgagttggaatcacatttgactttatttgaagtttatcagttatcttcacaaatttatctgcgacaggttattagaaagttaccacctgttgttcccgaaattcaagtgttggcattcaatttgaaagaagatctgaaaattctaattgaggcacccaaattaaaacatagtctagcatttcctatgttattattgggtattagtgctgtcactaaaactgacaggaaggaagttatacaaatgttcaaaaaactaatacaaacttgtggttatttaagcagttatcaaaaactactatttgtagtacaaaaaatctgggatttaaatgaaactgggtcattatatatagattggtttcaagttaccaaacaattaggttggaggttaaacttgggaagataaaattatttttataaactttcaaatattatatagagaattaatagaagaaaaacgttatttaatgaatatgtttaagaaaaagcatggaaatggtacaaatttaaattttgattatctattttaacttttcatttgatgaagatgataaaattacatcaacattttctactttcccattgtctagttccataccaatattatcgtcaagatcgggtctcttacctgattcaaagtccatatccattaaattaataattccttttttgaagtagaaatagtcataacagaaccaaataataaaaaatattggaagcatgatgtaaccatcaataaatgttttataatcaaatggtttgaaacatgaccaactttgaactaatgttaaaacaataccaattacaataccaatataattggaccatgggaaaaagtaagccttgaatggtaaagcatctaatgagtaaccttgtgctatcaaaccttttctgaatcttaagtgagtaatagaaatggaagtccagaccataaaagctgcaacacctgtaacggaaacaatgtaggagtaagcaacagttgaaccagaggagtaagataaaattgataaaaatccaaagatatgaacgaaatggatagcaacataagggacacctcttttattaacagtggtgaaaatctttggtccaaagcctgcttttgaccatgtaaaaagtgatcttgaagcaaaatagattgctgagttaattgaagaaaaacaagttatccaaatcatggttgtaacaaaatattttgagtttggccaaccagcttcagttaaggcaatagtcattggtgatctcataactttatcagcttctgtaaggaatggatcattgtatggaactgtaataccgtaaaaaattgataaaccaaaataaacaaaaaaaactctaaaaactgtacttctaacagcagttggaattgcctttcttggatttctagcttctgcagcaataacagaaacaccttcaatacctgaatagaaaacaccggcataaacaaaagagtttgcaatacctttgaaacctgatttaagagggaagtttccaaaaggattgtctggtttatgaccaggaataccacctgcagcataaataattgcaaatatgtagaaaccagataagaatgataatttcaaaaaaccaagaaaatattcagcttcaccccaccatgaaacatcaagacattgaaaaatggtgaaaataaaccagaaaatcaaataccaaccataagttggaacagttgttgagtatgtttccaaagctgctgtcaatgaagtatattcagcaataatatttgtaatccaaataatgacataaaaaactgcgactgttgcaccaaaacctttagaaacatatttagaagctaaaatagcaaaattttgatcaaaagctgcattcatttcaccaattgaagccatcattgagaacactaatataccaacaattgcaaaaccaacaagtaaaccaactggaccaccggatgctaatgcattacccataccaataaaaacaccgggaccaatcaaaccacataatgcaataagattgatcattctatttttaagacctgctttcaaacctgaatctaaaacatcgtcgattctttcattttcatcttcaaaaaaagcacttgaaagttcagcatttgctgaaacgtgtgaggcctgttgtgttatatttaacatgactttatttgtttaaaaaaataataattttttatgtataatattaataaaacataagacggatcaagtacgatctaaattataacgacggttagctttgtatttatagaagcttaaaattaatttgaatcaaaagatataatgactgataacgagaagatttgggacgttcaagacaatcaaaattataataacaatttatcttatctccccagtaattattgaaatgtaaccgagagtgacaatctgtgtgaaatacctgtcaaaacaagtacaaaatctatcaaaaatacccgtatcaccaaaacttttcaaaactaaattttaaaaaactattgttgataagagtaatattgccaatttgggaactgttgccgctgtttctatgcgacatttggcgcttaagtgagggtgactttatttgacgttaatttgacttcacattagccgttaaatgtcgccaattaacggcgcttgtgtcaaatcagtaaagtgtcgttgggttattagtctgattgtctaaatgagacaactaaataaaattcattatataattaatggtatatttgccttcaaacaacaaaaaaaaaattaaactaacttttccacaataagaactttgatttttaagtgtatcatgactgttaataaagttgagaatatagaggaaagatttaatgaacttgtaaagaaatttcctatcttagatacacataatgattttccatataatttacgtgtccaattacattatgaattcgaatctacaaaagagttcaattttgattcattattaacatcacaaactgatcttgttagaatgagagaaggtaaaatcggtgttcaatttttcagttgttggattgaatgtaaagaagatgatatgtactatcaggactttaataagccaaatagtgttgttagagatactttagaacaaattgacgtagttaagagacttgtggatgaatattctcatagctttaagtttgttcatactgctgatgaagcactaaaaagcttccgagatagtgaaaccaaaaagatatccatcacattaggtgtcgaaggtcttcatcaagtcgatctctctcttgctgttgttagacaatattacgatctaggtgttagatacatcacacttacacataactgtgataatccatttgctactgctgcatcttctgttactggtggtttacctgataagggattaagtgactatggtagagattgtgtcaaagaaatgaacagactgggtatgatggtagactttaagtcatgtttctcataaaactatgttggatgttttggaagttactcaagcacctgtcattttctcccatagctctgtatattcacttactaagcatgaaagaaatgttagagatgatgtgttgaaattagttaaagataatggtggtgttgtatgtattaattttttacctatatttttgaaacagcctggacatgacgaagttacagttgaagatgctgttgatcatatcaaacatatcgtcaatcttattggatgggatcatgttgggtttggttctgattttgatggtataccaaaaggaccagtaggtcttgaagatgtttccaaatatccaaatttaattaaaaaagtttggggagcaactggtgctacagaggaagatattgttaaaatgatgggtatgaatgttttgagagtatggaaagaatgtgaaatagtttccgaaagaatgaaaaataaaataaaacccgttgagtctaattgggaccaaagagaatggatattctacgaatactgtagagaatttcctgaattattccctggtgcatataaaatcaaagaaaaggaaaatatttacaaagatactcaaaagcttgtttaatttttatcaagtatatagcatttagaactaaaagttatgtgagagtttgagcaataataatgttagtaatatattgtctaccaagcttcggagtttcctagtcattaacccatctcatctcatccccggtgtaaactatgtattttataaacttacgtaatataaaatgttttctggcatactgatttaaagccgttcttgtgccgtatggattttccgtattggtttaagacactctaatcggataatcaacaaataattttgataatcaaggtgtaggaagcctgtttcattaaccttaaaaaaattactaattataattgcttctttctagttgaaagttacaacaaatgactgttaacaacatagacgaaagactggataaattggtcactcaatatcctattatcgatacacataatgattttccttatgccttaagattacatttacataatgaaataaaaactaaggaatttaattttgattctttacttacatcccataccgatttaattcgtatgagagaaggaaagatcggcattcaatttttcagttgtttcattgaatgtaaagatgatgattatttatatcaagacttcaacaaaccgaatagtgctgttagagatacattagagcaaatcgatgttgttcagagacttgtagatgaatactctcatagtttcaagtttgtctatactgctgatgaagctttaaagagtttcagagaaaccaaaggtaaaaaaatttctgttactttaggtgttgaaggtcttcatcaagtcgatctctctcttgctgttgttagacaatattatgctttaggcgttagatatatcacacttacacataactgtgataatccatttgctactgctgcatcttctgttactggtggtttacctgataagggattaagtgactatggtagagattgtgtcaaagagatgaacagactgggtatgatggtagatttaagtcatgtttctcataaaactatgttggaatgttttggaagttactcaagcacctgttattttctcccacagttcagtttacaaattgtcaaaacatgagagaaatgttagagatgatgtattgaaattagttaaagataatggtggtgttgtttgtgttaatttttaccctgactttttaatacaggaaggtcatagtgatattaccattgaagatgctgttgaccacattaaatatattattaatcttattggatgggatcatgttggttttgggtctgattttgatggaatgccatgtggtcctgttggtttggaagatgtctctaagtaccctacccttgtgaaaaaagtttgggaggcaactaacgcgaatgaagaagatatcattaaaatgatgggactaaacgttcttagagtctggaaagaatgtgaattagtctccaataatcttaagaataaaattagtcctattgaaacaaactgggatcaaagaaaatggattttcagtgaatattgtaaacaaatgcctgtattattcccaggtgttgaagacgttattgaaaacaaaaacatttatgtaaatcatcatgaataattgggtgtaatgccttggacttttttagtttaataccattagtttaaaattttttgacgtgatattttaccgcccgcattttttatcaactgcgcttatcaaccgccaatttgattcctaatcttctccaaaaaacttggaaattcttctttataaagggatctaaattcttctttcttttttagattaatattttattagtcttatcaaacaagcaaaaaaaacagaaaacagtaatgccagaagtagttgttttaggttgtggtattgttggtttatacaccacatattgtttaataaatgacgcaggtgtttctcctaaaaacattactgttatggctaagtatatgcctggtgatcaatccatcaattatacctctccttgggctggtggtaacttttcctgtattaccccaaatgacaaagaaactttagctttagataaatttacatacactaatttagccacaattcaaaaaaaattaggtggtccttcatgtggtttagatatgtatccaagtactgaattatgggatgaatatcctggtgacgaaaaaatcctatcactaaagagttatatcaaagacttcaaagttattccaaaatcaaaattacctgagggtgttgagtttggtattaatctaactacatgggatttcaattgtccatatttcttagctaattttaaaaaatactttgaaggtcttggtgttaaatttatacaaactgaattaactcacataagtcaagcttacaaacctgatactaaggttgtttttaactgtactggtattggtgcattttcattatccggtgttaaggatgataaagtatatccaactagaggtcaagttgttgttattaaagcaccacacattaaacaaaataaaatgagatggggctctgattatgcaacatatatcattcctagacctttttctaatgatgaacttgttcttggtggattcttacaaaaggacaactggactgctgatacctttgaaactcaaactgcagatattatcaagagaactactgagttattaccagaaatcttagacagacctttagaaatcattagagttgcagctggcttaagaccaagtagacatggtggtccaagaattgaagttgaacatattgaagataaattattagtacataattatggtgctagtggttatggataccaagctggtttcggtatgtcccataaagcagttgctctttacacaaaagctaagagacaacaatcaggaaagctttaactttttagaaaatttataaacttttttatttatattactgtcctttaaattattactctacaactatatttgattttaaacggtatactcagtttttcgaaaagaccgtttgattaaggtcggactcaacaaagcaactccgaaaaaaacatcgtgacagttcaaaaaatttaagcgcaaattcaagcgcttaatgtcgcttacgattcagcttacattaacgcttatattatgcatgaatcatataggttgctttattactcctaacatgccatttatggcaaagtggtacgacttggatatcaatttttagggtctggtttactattgatacattaatcgaagtataaaagggagaatagtttcaatgttgaatcaaatatgatctttggaaatattaaagttagacaagatcaaaaaaaagtgaaaaatgtccaatgttgtggttttaggttcaggtattgttggtttatatactgcgtggtgcttaattcattatgcaaatgtaagtccaactaaaatcaatgttattgcagaattccttccaggtgatacatcaataaaatttacatctccttgggcaggtggtaatttttcatgtatttcaccaaactgatccagatacattagcatacgataaatttacttacactcatctaaaagatatcaaacaagcattagggcaagaatgtggtttagacatgagaccaagtactgaattttgggatgtttatccgggtgatgaaaaaatcaattctttaaaaagctatttaaaagattttaaagttgtaccaaaatcaaaactacctgaaggtgttgcatacggaattacattcacaacatggaatttttattgtcctttttttatttcaaagttaagagctcatcttgaaaagttaggtgtgcaattcaaaagacaaaagctaacacatatttcccaagcttacattccacatacacttgctgtatttaattgtactggtattggtgcagtttctttatctggtgtaaaagacaccaatgtttatccaacaagaggtcaagttttagttgtgaaagccccacatattcaagaaaataaaatgagatggggagcagattttgcaacttatattattccaagaccaaattctggtgggcaacttattttaggagggtttttgcaaaaggataattggactgcagatacttttgaagaggagtccaaagatattattgaaagaacaaccaaattattacctaaaattttagataaaccaattgaagtattgggagttgcagcaggtttacgtccaagtagatatggtaatgctaggatcgaagcagaaataattgaagatagacttttaattcataattacggtgctggtggttatggttatcaggctggattcggtatgtcccacaaagcagttgaactgttcattcaaaataaaaaactttcctcaaaattataagttaaatttttctgtcttttcaacattcaattagttcgtttctttataaaatcttattcagtaaactatttttaatatataaatctaattagaattaatcatctatctatgatgcaaaaatctagcaaaatatttatgtgggctctaccaatatttccaagagtcaatagaaccacaaccaattgagttttcaatttcatttgtgtcgttaaaattaataaaactttcaacagtcatatattccaaaagctcagcttgaggtttagttaacaaaccaacccccttaccacctaaagtagttttaaaggtttcaaacccattatcgtcaaattttttcaaaagtttttcataagcttctgtatcgtaatcatcatgtaatagtgtgattgcacatccaccaccaccggcacctgttagttttgtttcacctattttaagttcatcgcaataaagtttaattctttctaaatttggatgtgatacacctaatgaaactagcaagccgtggttgattcgaattaattccattaatctttgctttgattccggatctaggaatgggcgaaccattaaattataagcttcacgagcaatagcttcaagtgattccaaaatacaacctgttgtctttgggaaatcgttaacaattctagcaacatttgaaactaaatctgctgttcttctaggagttttagtatttgttaaaagaagattgattgaaggtaaatttctcattgatgtacgaacacttggcatggaatttgtcattctttggaacataacggcaccaccatgagttgcaacggcattatcaataccacttgggttaccatggatacatttttcacccatgtaagaccaagcatcaataaatttacattcatctgaatcttttacaatttttgaagatttttccaatgatgcttctttgatatgaccacctatatatgcaaaaccacttgcaagacaaactgaaatagatgctgaagatcctaatccggcaccaataggtaactgttgatctaacagtaaatgtaacaccactttcaaccgaattattacatagtgacacaaataagtataagaaacaatatgcagctgtgtagtgtaaaggtgatgagattgtagttaataaaggtgtaagaccatcgactagttcagcattaagttcttcacttgcaggtgggataccttgttcatgtgtagttaaatgccatggtagttgagactttttccatttatggctcaaccctatatctgggaactccagataaatatgttcatctgctggatcatcatttttggtaacaagtagatatgttcgtaaagaaagagctgctgcaattgctggctatattttattaaaagtttgggtgtgttagtttctagaaatcatagattgaacaacatgtttatgttgaatgttgaatgttcgaagatatacgtaccttattataaactgctgaatgttcaccgaaaagaataacttttccaggagcactggtcaaaaatggataatctaccatatttttttttcaattgtttaagtgactaagtgacgaagtgtgaattgatcaattaaagatatatcgacatctaaatatacttctctctaatcgtatagccagcttaacgacagtgtcagtcttgaaaatggaaagttttcaaaattatacgacgcgacctgctccaaatacggaattttatttttttgctttcactgcctgaaaaattttgatactaaaaaatttttattaacaaaaatttaattctttaaacaaagtatagaatagagaccttaagacagttacagttagatactttactatcattaaggaacaatgtctacaaccgaaaaacaatcaaaggatcaaattaaagtgaagttttttaccagagatgaagatgaatcacttcatgtttcctcaaatcctatttatattccagtaacattgaaaagatttggtttatcagagattgttaaccatttattagaaacagaaactgcagtcccttttgaatttttaattgatggaactattataaaaacagacattcaagattatttagtcaaaaacggtttatcaacagaagcctttttaacattagaatatacaagagctgttttaccaccaaaatttttatcaagttttaataatgatgattggctttcatctatagattccataggatcaatggaattaccaggtgctaataatggtgaagctgttgttactgctccaaagattttaactggttcatatgatggtattgttagaatttataatgcatcaggtaaagttgaaacacaattaactggacattcacaaccagttaaagctgttaaatttataagtcctaacaagtttataacagcaggtatggatagatctatcagattatggagatcaggtattataagtgatgaagatgttgaaaaagatacccaacaaggttcaacttatgcattgcttgactatcataaaagtacagtttcaagtttggcattaaatattcctacaaatagaattctttctggttcatatgataactctattgcattttggtcaactaatccaaaagaaatgaatacttcagctccaattgatatttcagaaaaattatcatcatcttcaagaaagagattaaagcttgcaataaatgattccacaattagaagaaaggcaccattggcaattcttgaatcacatagtgctcctgtcgaagatgttctattttcgaataatgatccaactattgcatattctgtatcacaagatcatactataaaaacatgggatttgaatgactgcacgttgtgttgatacaaagcaaactaactactcattactatcattagtttctttaaataatatgaatattctagcaacaggttcatctgcaagacatataaacttacatgatccaagatcttcaaaggttacaagtagtcaacttattggacatacaaattttgttgtttccttagcaacaactgataatgaatatatgctcatctctggttctcatgatggaactgctaaagtttgggatattagagcaaataaagcaatgtatacaatcactagagaatctggggaaccaaagagtaaggttttctcagttaactggaataaagaaataggtattatgagtactggtagtgataaaaagcttcaaatcaattcaagtgctgaatttaaataagaatctatgtgtaatattaattgattgtttatttatacatgtttataaaactaacattatcgtaatttataggggaatgaatcagtttatggctttacagcagtccatttagtaacattatagtaaccttgccataaacctttcctatcagttaaataacctaagagttcaggttctacttcatctgtgactttccatcctaaacttttaatcaatgttttgagttcttcgtctgatagttcaatctgtgctgcagttccatacttcaatggacctacattaatccattttgttgttccttcaacttgggcagcaattctatcaattgattgaatatattcaaccaagttctcagcagtatccaagaaaaaacatgtaacgataacagcattttttggtttttcattagctcttaaatgttcatttatgtcaaattttgtaaaatcggctgtatgaataaataaattttccggtttttctaaatcatgttgaatttcaactgaacggatttgatcattcgtacttaaatgattcgaatatgtatgtaaataaggataaatttcaacttgttttcctttgttttccttcatgaacaagtattcgttcattaaaaccattaaccaagaaaattcaactgcatgaacagataaaaaatttgaatcgtttgctaatgtatgtgcaactttacctaaacctgaacctggcactattgctatggtgtgttcattgtttaattcgtctgcttgttttttgatataatttattaatggagttatttcatcacaaggttttaatggccaatcacgagcataatgacataaactttcaacaactctaaaataattgttttttttattcaacttatactgttcctcaacaattttcagttcataatctttaattttgtatttttcaattgagttagatacgattgttgataatattttattatttttttcaaaatatttatctaccatgtttaatttcttggcataatttgtgacacttgcaatttgttgttgtaatggtgacattttcttgaaaagtattctacgcttattattccatttataagcattttgtaaataacttttaagatcaaaaattgaataaagcaaatctgttcttgattgatccagtttaatttccttgacttcatttatttcatatgcatatttataaattttccttttaaaactttgcagcattgttgtttgacttataaccgttgtaaataataatgtacaaattataagttttatttggtgtaacgattgaggtagtatagaatcgaatacaaggtacaatattaagataattgatattctagataaaaatatagaagtttctccaagtgtttctttatttatattcactctggacattcccttattgagctaaaatgcatatatgcatgtatgaacatcaaaaaaatcaaattctaaattgttaaaaccattggggtaacaaaatttaataatgttatatagtatgggaaatttcccaaaacaggaagagcttacttttttttgcagaagctccccggatagaacgcgcattattagaattcctttaaaatactatgtacggctcaatcgcattttagtactgtaaagttctgcaaattttactaagcacataatcacctttcaccgtttgaaaaacgttttgctagtatttcagttttaaaaattatttattgttagttttaagactgtttacgtaagttttctgatgattcaaagcttcttctagtttattcttatatagttttcaaaatataaacatttgaatgaagtctatcataaacataggaacggatttacataaacttagtcgtttcactgaaatattgaaaagaaatggacccctttcagcttttcaaaaccaaaaggttctccgaacgagtattgaacaaaacacatgagatgcctctattagaaaaatacatcagtatgaatgatatagagaactgttcaaaaatattgtcagtttcttggtgtgttaaggaatccatttacaaaacattagatgatgctgatcaaactaatttcaaaatgtctgactggtataaaattaatgatgaaagaggtcgacctataataggtaatgaaaattataaactattacatccaaatgaagagtttatttgtagtataagtcatgatggtggtttaatcacatcatgtatcattcgtcagagtatgtgcaatgcttagtagttctttatgtgaaccttagtatataaattattaatattagtataaaatttcagtgtctagaaaataaatgaagaaaagttaaacaattaatctattcccattcgacagttgcaggtggtttagaagtaatatcgtaagtaactctagcaacaccatcaacttcgttaacaattctagaagcaactttctttaaaaatgcagcttcaaatacaaaccaatctgcagtcatgaaatcagtagtttcaattgctcttaatgcaataacttgttcgtaagttctttgatcaccaacaacaccaacagatttaacaggtaaaagagctgcaaatgcttgagaaatttggttgtataaaccatgagctttaatttcttcaatgaagatataatctgcttctctagcaattttaacttgagatggagtaacttcacctaaaactctgataccgatacctggacctgggaatggatgtctccaaactaattcatctggaatacctaagattttacctaaacttctaacttcatctttaaataattctcttaatggttcgattaactttaatttcatatcttctaataaaccaccaacattatgatgagttttaatagtttgagatggacccttaaaagaaattgattcaataacatctgggtataaagtaccttgtaataaatattcaatatctgaaccatcctttggcttaatttcagctgcaactctttcaaaaacgtgaatgaaagtgttaccaataatctttctcttcttttctggatcagtaataccctttaatttacctaagaattcatcacctgcttcaacaacagtcagatttatacctaaaccttcatctaaagttttcttaacagtaacagtttcattctttctcattaaaccattatcaacataaatagcatgaaatctatcaccaattgcttccttcattaatttagcaccaacagtagaatcaacaccaccagagacagcaccaataacttcagcagttggaccaactaattgtctaattctcttaatttcagtttcaataaagtttgccattgtccagttttggtttgctttacagattgaaactgcaaaattctttaataagattttaccttgtaaagaatgggtaacttcagggtggaattgaagaccaaaaattggtttttcagtatgtgcaatacttgcatatggggagttaccagtttctgcgacagtcttaaaaccatttggaagagcagttaatttatcattatgagacatccaaacttgagagttgttaacacctttgaataattcacaagcttcatcaacaacgttaacaacagctggaccatattctctctttaaacctctaccaacacctttaccattaatccaagctaattcttgcataccataacaaatacctaaaactggaacattcaggtcgaaaactgctggatcaacatgaggtgcaccttcttcatatactgaatatggaccaccagaaagaataacaccaactggtttgaatggtaattcactgattttttgagtacatggtaacatttcagcgtaaacattaaattctcttaatcttctaatgattaaatgagaatattgggaaccaaaatctaagactaagatagtgtcgaaaacttggtgagctggagcagtttcttcaatagcagacatggttaaatgaaggttctttttttacttattaaagattaaaataaaatagagatttatagaaatacatcagagcaatgaagaagcccaaaagaagaaaccaaaccaattaaaagtaaaagaagaaaaagcaacattagattggaataaaaaaaattttatttaatgaaatatttattagtcaagataaaattagaattccaaaagaaaagagcagcgctttcagtaaattttttggctaacgaatttataaatttttatttgagcgctccagtataattttgaagagtcacattggtggctcaacggtttttttactgagcttaactttgttttatttcatttgcatgattggatttatggttgtagattgattaaatggtagtgtaatatatattttttcagacctttgtaaactaactgtgttttttgccgaaaaacttttaaatgaaatttttaatttttatcatcaaaaataatttaaagattttaaaaacacaattgatatttgtaaaaagattattttttttttaaaaatacattatcttttgagcataaaaaacatccaatgaacaaacagcagcttcaacattgcagtttactttaataatgcatcattgcagttgaaacaagacattattttgtcaaattgacttcagattacaacattatgaatgtcgtggatatattgcattgaaaatgacggcgtggagtcgctatacatcggttaataagatcagtctacacgaaacaccaaaagatgaaatcaattgaaatgcaatttatgatctttttaattaaataaaaaacgatttaatgaagagaggatcactaattgcaattgaaggtttggatcgtacaggtaaaactacacaaactgaatatttactaaataagtttaaagagttaaatattaaacataaacttgtaaaattcccacaaagagatacccaaataggtaaattgattaatcaatacttaactgataaatcatttgaactaagtgatgaagctgctcatttaatatttagtgctaatcgttgggaattagcttcacaaattaaagatgatttgaataatggtataaatatcgttcttgatagatacgtatattctggtgttgcatattcctctgctaaaggattagattttgagtggtgtttatctcctgacaagggacttcctaaacctgatgttacgattttcttaaaatttcaaaatatagatgaaatttctactagaaaaggttttggtgatgaaaggtatgaagttgccgaatttcaagataaagttagaatgatgtttgaaaaattcgaaaataataaagaattttcaaaagtttttgttgataacttaggtaaagaagaagttcataataaaatatggcaaataataaaacctttatccgaaggatgtgatgaagaactttcttttttctaacttgtataatattctttgatctaataacaaaaatttattacattctatttagaataaagagacaattactaaaatacacacactaaaattcattttctgataagctacgttattcagaagtgaaaaaagtaaaaaaggacaagtaaaaacaaaagagacaatgaacaatcaatattgaaaaaaaaaactattatacattatattgcagaaatagtaaagtttattaactcactttaaacactaaataataaaaccaaattgtttccatgtatattaaataacttcgagctttcttcatcattattttcaaacaaaagccaagtttgcgtacagtgataatattgatgtgaaaagtgcatcaagtaaaatccagtttccaaaaacgtttcttaagttaaagacagcaatgaggaaaaagtgtttgaaagtaacaaatttgatatcaccaatcgagaaaacatatttaatttcatcctttaagttagctaaatcaatatcagtcttgaaaactaagatagctaagaataatttagcaagagattcagtgaatgcatctctatcaaaatcgtaagtgaaattaacatagtatgagaacactaatggtaaagcttttgaaattaaaccccagagtaagaatgttgaaactgatgcagtactgaagatttcagatgaaagcacaggaattttagaaatagtagttggtaaatattcaagtgctttactaggcaagtatgaatcaagaggggtaagtgaaattaaagagtaaaataagtatgttgtttcaatataataagctaactcattgagggtgtatggatcacctaaataatctctaatttcatagttctttaactcaaagtattctgataagttgttagttttgaatgctttgacaatgttggtataattttcgtaatcaaaatcatcatcatcatcgtcatattcataagtatcatcatcatcgtcatcatcatcttcctcattttcgactttctcatcactatcatcatcttcagcttcttcagtttcatcgtcatcatcatcattgtttttgttttcagtttcttcaatatcaatgtagacagtcttctttggtgatccaagtttagctaatgaggcaatttcatagtattttgaattttcatcaaatttatctgcattgttgacaaagtaagcatgaactacttcgtagatttccttcttgactttacagtcagtgatatcaatattgagatcctcagctatttcaactaattgaccctttgttttcttagataaggttgacattttttcttaatgaattgagtttttctgtggattggttttcaaagataaacaataatatgtgacttataaaaatatatcaaaacaaataattagccaattcctgaacaaaataaacaaagaatgaaaacattgggaactttgaaagaaaaatataaacattcaatcagatctttatacagtgaaactcaaaaaaataagtttcgccctacattgttatttatcttttacccgattaggaaatttgttttacttttgtttccaacatgttttgttgaagattgaatttacagacaaaattttatgttggtacacgtgaagaccagttatattaagcttctaagtgtaattgaatggtgtttagcatatgttaaatacacattaattttatttagaaatatcacagaagtgtgcttttatatgcccagtaatttttacgtataggatctagcctttcccccaaaagtgtgaagatttctctttgtttatctgataatccttgggttccgtagattgtcgataacaattcaaatgctggaatagaaactctttctatgttttgatctaatttagatttgtcaagatcggcactgaatttgtatactattttctctatatcagtaacatcataattcacgttaatactcatatcatataatgatttcatgtaattccatgatgatgggttagtaattgacaattcaatcatctttatagtaaaattaatctcagaacttaatacatctgttgatattgttttgatttcaggatttccaaataaaagaaaatgcctaaagttccaagctgaattgtttcgtatatcgtcttgtatcagtttagtagcatactcaagttctgtttcatcattgaagagagaaaaatattgcacaaaccaacgtttatatgaccaaacatgatagtttttttcgtctttctcaagcatagttccgacaatttcacgttctttctcaagatcgtattggcttttatcaccatcaagttcttttttgattatcaattcaattatcatttcacgataatgccatatttgataatttttttgattattaatagcagtatttgaacaccattttaattcatctgataaattgaaattttcagtttctattaattttttgacaatatctaacttgtattcccaaactgtataatgcgcaggaactaactcaatagcacgacatgcaacatataatgctctttcacttagctctttttttaaaagtaatgcacgtaagtaaccaaatactgtcttgaattcttcagtgtacatgattttacataaaactacatcattgtcatcgataactggcactggtgtgatatcgtcaaaattatattcttctgtattcattgtcatttttggaaactttctattcctctgtaaaatgtttaatactagctatatcttgaagtcaactattgagtgaacttttattgaaagaacaaagttttaagatgttatataataaaaataatctccataaactgaaggagggtatgaaatttaaaaaatttcctattccggcgaactcaatatagcttatctttacaatttcagataacatgatcgtaaacgatggaacaattatctttttactgtctttttaaaaaatggatactcatattaatacataataaacttttagtacactcaaaataaacttactacttgataaaataatcattaaaacatcattttactttcatttttgctaaacaatcatcacaataccattcacctttaggtaattctttcaggccagtacacggtaaatgaaaccattctttttcacaactttcaccatcacaaccgaccatttcaccatatgacacttgttgacaataacagtagactggctcaccatcataattgattggtgatgtagcttcttcggttttagtttctttctttgatctattaccacgactattactatcagatacaccaccatttttactcttaccactggcactagcattcaagttcgagctattagtttctttcttagtctcttttcttcttgatgttttacctctcttagaagtgctatcactattattattattattattattattattattgttattattattattcactaaaacagaggcagaattataagtttgttcattttctccagattttctctttcttgaagagtttgacgctccgtttgcactagaaccattggtcttgtgattattattattttcattgttagtgttattttgataattttggtattcagtttcttgagatttatgtactccagtgttcaaagctttgagatcctttcttgaacctctagacgatttcttagaaggaccagatgattcttcacctgcagtattttcatgatcatcttcaaatcctcctttagctcttttagcagccaaagcttctcttctactttcactacgttgttgatgcgtactctttggttcacttaccttcatacatggttcccacattggaccaattctaataatttcgggtatttcatggttaattacaatattgtatgctcgatccattcttttcgtatattttttaacatggtctgatgcaattgttgcaacatgcattttttcttccaaacatggcattaactcacgtatacaatctcttattctagttaataataaccctcttttaggatgatcttttctcatggttagaaaccttttaatatatgcttctaaatgaggaacagtgtagacacattttgcttcaatttcttttaataaagtaaaatagtttataatatcatttggaagagcactaatattatcagtaagttcatttaatccataacaaatatctgaaggttgtggattcgtgataggatcatgtatactcttatatgcagagtcatcaatttgttttaaactcattttactctttttcaaagcttccctctgttttcgatcttgtatcctaatagatttgttacgtggtggtagattttcagcactcattgattgatacaaaatatgttattgttgaattgcagataaaactcagtgcaatctaaatgtaaaatactgtgttttattctgcagaagaaatttctttatcgatgatgtccttagttagttaaaaaagttaaatttcattagctaagccgacgtaacgacgctgacggatcagtattatattttttaaatctactaacatgaaatttttcattttttcgattgatagaaatttgaatgttaaactgttgaactttcagagtaaacaacgttatgttgtcattattagtacgaaaacaccaatgtcaaagttacaatagttttggaaatatacttacacgtttttttcaaacaaaaaatgctggtccatgggcaagaattcaaatagataatgtcagtgttgaagaaagatcaattttatacgaattagaggatcttgaaatgactgaaccaccacaaagtaatataccgtttttagtatataaatcctttcctaatgaagttaagtatcctaaaaaaccaaaaaattggaacgatgagaatctatcatcatatatggattctataattagtaaacatcatcttcgtagtcaatggaaacaaataaatgatgatatcaagaaattgacatatgaatttccaactgcttttagcaaagaacaatatatcaaaatgcttttgtttcttcattataccaataatcataaattgaaatttgaagttttgaaccatatgctagagaatacaaatatcaaacaagatattgattttcataatattatgatatctccaactactaaaccaccaaattatccaaatttcatcgatagactatcatcgattcgtgaaagaaaacaaaaaattaatctgaacacatggtattattcatttttaaccttaaagtccgaagatgcaaaattccaattacttgaatatatgcatgataataaattatcaatcttaccattattatcacacctaacaccaattgcccacaaaatttctcctcatgatatgaaattaatattggaggaaaacaacatagatttagaaattggtactggagacaaaagactcgattcaatttactttgatgaaatgttaatttcatatttgaattgggaaggtccagaggaagcatggaaattttcgaaatcatctaaaaaatttgaaaagtatttcaatattaccacatttgttactcttgttaattatttcagaaaaaaaaatcaactgggtttttgctttgctttatcacattatttttacactcgttatcatgttaatacttcaatggttttgttaagtattttgttcaatacacatttaacagcatgcgaaccatttgataagtggcgtgaattgacaatggttgcatatgatgctaaagataaattctttgtcagttcaggaacgttatcaagtttacatgattatgcaacgttacacaaatttgatccacattttgaaaattttacagatgatgaaaaaaagtttagaagtaacttattttattctcttcgatggagtaaagaacctatttttgaattatccaaaaataacaatgtttttaaaaagatggctaaactaattggccagaaagaataatttataaaatgttactagatgttcaatatttactaaaaattcgtcaatcaatttgaaaattttaaatgcatgtagttataaaattaaagaaacgtaagagaaagaaaggagaaaaagagaaatgtagatttatagaaaactaatgaaacgaaaaaaattagttgaaattctattgttaaattatgattatgtagcaaaatttgagtaaactgaaccatttataaaggtctttgttttttatttggattcaatccaggatcataattggtctgatataatctcttattattgttagattggtcaatactttgattatcccgtatcatttggttattaacattatcatttatcaatgtatttgacggtgctaaagtatttagttgggcatttgtaaagtttggcgtgtgcaatggtgtctctgtattgataaatccatcaatattattcagatcaataggtgtggcattcaaacttaagtccaatggttgttgaaaaaagtcatcaacttcaaagttctctggtaaatcaatttcattgggatccaaattatcattatatttgttgagccaattgtttgcattttttaaagtactttcatttttatgaagttgattttgaatatgcgtaattatattagatgagttttgattcctttgttctgatagagaactatttgatgattcatttaaactttgtatttgattgttgcttgcttcagacattgaatttctttgatcgacatcagaaaattgtcttggagtgttaatgaagtctggcatttgtcttacatagtttgtttgcacattggaatttctattctcagggcctctttgaatttcatgaattgaagagtcaacagtaccgtcattagtggctgtttcataatttaaattattcattctaacttcatttggagatctagctgatttagatgatggtgttggtgcgtttgaattgaatccagcacttaaatcaactgaaccatttgaacgatttgttatcattaatcttcgtccattagtaccattgtcgttcatattattgttaccattatgcatagatggcgatccataggagttatagtacggtgcagcctgaatagcattactgcggtaatctgggctcgcaaattgttgatttggactagtattactttctgcataatagttgttgtaacgattattttgtaaagctacttgatttccaccttgatagtttgaatattgattttgttgatcataccttctaggatattgatcacttgtcatcaccatagagttaggaatatttgaacttctattacgattcatgttattattatcattcatgttgttgccatagttgttgttatcattggtatttagatttgtattatttttggatctgccattcatgttgttaccattattaaaaccgaaacgattcgaattggggtaatcaaatgaattgatttcaaccaaatcccccgtgttaccattatgcatttgttcaagtaaattattggtgttattaccatatatgcttgccaagaatctcatgattttatctaatgtatcagattgtattttatgacgttctcttgcaataaagttttccttccacaacagctcattatcatgtcgaactcttcttagatcttcagttatcaaaagttgattccttttcataagctctaattgctccatcaaagcttttatatcatattcttcctcttctgcatgattagctggtttatttctgactatattatctagtaagtcttctcttcctttgatgaaatttttgttttcaaattgccatatttcctctgattgtatcagtgatccagcagtaggatcttggacttttctccaaccatacatattaagttgtctaacaaatgatgcaaaattattatgcttaaaatatttaggtaaaacttccttcataaattgttctctatcaaacacttgaatcacatctcctggatcaacccatcttatgtattttgaattcgaatcatcattcatcatttgccataactttataacaaacgccggtcttttattggattgttgagacgatatctttttaacagctttgggtttcttaataacaggtaagagttttgtatgattcggtatattcccagcatcattgctagagtcaacaacagtttgaagtaaatcattgttacccaatttattattaacagttgttaaagaagaattgatatcatctgctggaataccatcaatcgtattgataaaggtggaatctttcagcagctcatttgaaacatcatcattttctatactaattgaattcaatatatcatccttattaagaatttcattactaaggacatcatcaatatcgtcatcaatagtacgaatttttgcctttctttcattttttgtattctttttatctttaatatctttagtatgttttgagtttgagagattgtaggcaccggtaatatctggatcaatgggagtaatatctttcaaatgagttgatgaaacattagtacttacgggtgatattacaggaggattcactttgtcatttatgattatctcattactgttgttatctgggatgagtgatacattagactccgtatttgaaatagaagttgatgagattctatgactactacctttgagattatctgccattatttgcagatattatatgattgttaaccgggtattgtctctaagcctttgaagaaaatcgatgaattatttgacaactcttcaacaaggaactaccggttcaaaaaaaagctagcggggttcttcaaaaaatacacacttcactcgctctattacagcaaacattaaattttatagtgtgaagtgtttgcaaattgataattacaatagattatctcatgatttggttacttccactgggttacataattgttataccatcggaaatgattatgcattatatttacaggattgaaatgttacacaaagtttatataaaatgagtctattggctgagaacacgggaagtatctacagctaaacgaagtcgacgaacaagggcatcttctatttcttcagtatcagcatcagtggtattttgatcagaatttaaattgaatgttttgtagtaagttttattttgtccatcaggtcccttgacaataatacattcaccaccagatgatatcttatcagagaaaaaaacagttttcaatggtatctcttgttctgcaattgggatcttcatgatatttgaaatattcttgatacgactgaaatctccatcgttaagtttcatgaccgcaaaagtgctaaaactaccatactttgtactgatagtatcttgtatcgaatttccagagtttgtgacatgatcaataactgagatatcaacacccgggacacgtttacgaactgctgacaaagtttcccccaattcagctaaattattacttcccacacaaatcaaactcatattctctccattgttttctttgatattctttttgattatgactttggtaatgatacataattgattttgaaaccttgaaagtgtatgaaacaacttactactgttgtctgtagattgtgaatcattatagacgtttaagatgttaccatccggtaaaacacattcaaaacctgaaatgtcattgatatcaaatttattagcaatgattttagtatcagagttatttgtcctaataccacatcccatcatgaataaatcaactggactcaagttgttatttagtttgtatggaacagcatgttttttgaaagtttcccttatttcatcatgggtcatagtaaatgttaaagcaaatgcatccacgtatttggaagaatcatcttcctttttgaacttactgaagttcatttgaaaggtgattaagttattattactactagtaatatcaccaacatatattgggattttaaattcagaacaattttgcattatattagaaacatcctgtgtagtttcgggataccaaacaaacgccttaccttcccatgatttagggtctttaccaaagaagacttgactcatactttcatcatcattcatcacatcagcaatatgtgagttacagaactcacaatcatataatgattcattttcaccatattttacatcaactttgacacctttattctctaatattcttaatgcacacctcttaaacatatcatattgtttgttctctctttctttatcttctttttcatatccaactaacacgtttttaggtgttattgatccgttaggaaataatgtatcaggcggtgaagttaaaatggtagttttacctaatgtataacctgcacccatggcaccaacaattaggaataattgaaatgagaatgatgaatcaagtggtgaagatgattttgacgatttattattccctgaaccaccattggtattcttgtttagtatattatttggagaaccggttttagttggacctgcaataatagtccttctgaacccattacgaagcaatttatttgatttatcaatagatgccaatctattgaattgctgtattctgatcataggagttatagttgtttgtttattgaattattctactcgaaattttgttcacaaaagtagattcatcgattaaacatgaaatttttgctacactgtgcacgtcgtgatgaaattgtgaataatttcatccgttatgaatagttgattttactgaaaatattaaatgttactaaaatctatacacgacttaaagtaaacctggtatatgtctaagtagaagacaatacataatctatatacaatttgcaatttgaactttcataaaatagagatttggcacttttatttcatattttgcataaaattcttcatctttatacgttcaacattttgtttcttgatgattttacgattgtatctgtaccaatcttcatttttaagttgttccatttgtaaatctttatcaagcaacccccagagccagtctggatattcttcatcttttaatgcaacaattggtttccccgtcttgtacacatttatattgattttagttccttctttacaggatgactctaaggctctacagctagtactaaataatcttgctgcttgtttaaacatccttgccactgatctattgattacaatcaaatgaaaatcaaaagttttcttccttttaacttaaggtgaaatttcaccactgaaaatccataataattatattcagtgtgtgagaagttgaaagagaaaaaaactatcattttaaagcagtcgcgtctttttacgtaaaatcactaatattatgtaagtacacacagttaaaacgttattgaacccttttcaagagagagttggggtggtatctgattaatatcaaagtctttggacttatcagtgaactttttacttaaaatgatgtttttatatttctcttttacaattaaatccatttgctcatcggaggaaatcaacaatgtagataaatattcatcaacgaatgcaaaacgtaatttaactttatttgctatatttttcattatcctggagtaaagatcatcaacactcatttttgattcattaattaactctagttttcccattcttgccttacgagctaaatgtttgtgtattgccttatatcgattcattaaagaaaaagctatgattgctaattcttttttctcatacttcttttgtttgcagatgtaattaaaagtagcaatgcatttccaaattttaccatcattaagcagtccttcgataaatagtatccatgtctcttttgttacaagctcttcatatttacgcagttccctaaatgtgataccatccaatctataatgaacacagtttttaatgtagattttaaatgcttcaattttatcttctctactatcatcaattattttctttctaacaagatatttagagaatctatcaaaagtgaacttcttattcttttcggagaactcaattgtagtatagtcttcacatatttgccatttgacatctttatataccaatccttcattaactaatgctttgagcatggataatctcttctttgatgaattttgagaaatacaaatcaaagttttcgttacaacatcagtgggaatttcccattttttaattcccatctgaatgtatctttcaacaattcttttacgaacaaatttatcccttatttttctcgattcataaattaataaatgcaatgtatctttagttggaataatattcattttttcaaatctgaataataataagaaaattactttgttattccttgattctaaataaaacttgagaaattcatgcatagtattaacatccaaaatgccttccagctttaaaatattatgaaccaaattattcatttgtgcatgtatagtttttccagcattattcaaatcataatttaagtttattgaattcacattcttcaaatattcgtatacattttcattattgatatgttttggaaattgaggtacctcaaatgtaaaatcaatatttttcgttttatctttgacaactttcccataaaagtcgtcaagtgaatactctttttcacaatttttatttttgtcaagcttatatttagctttcaaaaaattagttctcgttaattttatcactgggtcttcacatggattcatctttaaagcatgttcactggatttatcatgttgtttagaattttcatcatttttacctatattatcttcatgaaacaacttctgtatctcaaggttgccactttttgattcttcatgctccttcattttaagtaaattattcacataatttagatcaacatttaacccatcttcactaaattcatcaaaatgttcatcagattcttctatgtcatcataattattgtgattcttatcgttaatctcattttgcagcaacgatccatcgtcagacaaagttaatgattcaaatttagaattttgaaatatatttccacgttgatataatgattccgacaaatcattgtactcattactttcttgaatatgcgtggattgagtatctttctttttgctggtctttgtcgtttgatatctcaaaaattcatgtatattgggtattctctctctatatcgtagtatattcagtctataagactgtcgtacccctccagcaagatggttcatcaatgtattatctataactatattttatgattaatatttacaaagtacttgttttccaaagaaaaaacctttttatgaaacattgattgacatgaaactaaaattgaaatataaatttcgaatactcaaatgaaaaaaaaaataggttaagatatagaagttttactctcttttaaggctatataaaagcattaaacaaaaggtcaactatttacagatcattgtaaaggttcagtagatccactaagacggttcaaatgaagataaacatcagtaccataaccttccatactgattaattttaaatcacctgaaaaatatctagcgtataatcttgaatgtggtaaaccaacaccaagacccatgaaaggaactttatgattattaaggtcaaatagttcttcctcttctttaatttgcttttctgcagaggtatagaaataggtccaaattaaagaaactgcagatcttggaattccaccaccttcatcagatattttaattgtgatatcttcatcacctttggcaacaataattttaattggtggatatttgatatcatcaaggtcgacacctggatttaacttactgtgatgttcaatggtagctcttaaactgtttttcaatgtttcatatagcatatgaaccaaatgccctggaacgtatctgaatgatagatcagatggacaataaagtttcacttttggaacatccataatattgaaatgttcttcacatgcaaatctagctgcatcgatggcatcatggataatttcctttatattacaatgtaaacaaataattccaacataatcatcattttgcatatttttatcagactgttggttgattgcaattgtttgtccaattaacattctaattccaattctactcatatagaatctatccaaaaattgattaatcggtgaattcaaatatttataattatttttttgtttccaattttgaacaccccttgctaatgttgtgacagttgcatcatgtcttcttttaattttgactaacgttttagtaaccaacttattataatcaattacttcttttgggtatataatatcatttggagcatcttgaaaatatgttgttaatccaataggcttagcaaaactatcatcaatatttcgattttcaccttcaatattaaaattaatatcattatcaaacgttgaattaatatttatatcattattggttaatttaccctttaattgatgattgttttttgttttatgttcgtgtttaatttcattttctatatccattttccttactttcctttttaaatttttaccaataactatcccatcatcttcaaatataaaattacttgtcctacgacctaattcagtataattttcgttattattacccaatttcccatcattaaattcatccttcaaatcaataaatccatcagtaccccaaattaaatcatccttttgatttttcaataacatatccctcattttatcatctagtacaggttcttcaagattcattaattcttcaaaactttgtgcataccaatcacgtactaatttaattgaagtttcatcacttaaacccattggtaaattttccaattctctgaccctatgactcaacctaattggtaattcatgtacagcaaaatatgaagcatgaaataatgtaccctgtgacggtcttggcccaaattgaaccatttgtcgtagtgaaacaccagtttgtggcagttttgcatatttatatatctgatgccttaaggcttcactaattttccatccggacatacttgctaaaatatcaattgatttgatttacaaagtaatttaacaaaaaggatcatcttgtcaatgaaatttttacttaagggactcattatgacacaatcacacccccacgaaaaatcagattaaatttctcggaggaacggaccttgttgtatgcatttagttgatatttatcaaagaaaagttgacatttatttcaatttaaagagtgttatacaaaagttcctacaaaaaaatcatctaccaacacctgttactgcagtaagaacagccccattcacatcattaaatagttcctccactctttcacgaccataattgatattttcattgattaaattagtgaaacgatctttaccaagcataaaagatccaacaatttcacggattttcgaaagaataacagtcatgaattggaaattatccaacgtgattatattcaaattattaccaacaacaatcaatgacaataataacatacatggtaaccagaagaataaaagttttgtatctgaattaattgatgtacgtaaattatctgcaattatatcaacatcactgtctttgaaactagaatcaagttcttcattcattatttcactatttttagttatttggtgttgttggtgttgcttcttaatactatcatcaccatgccctctgaaattgatcaatgatcttaatgaggatccatcagggaataaatcatcatacgaaggtaatggttcatcatcagaattaccattttcatctccagatttagttatcaacaatattatcaccatttttcatcttctctttagtaatttgtttcttacattttttcttagaatctcgagaattatcaatttcgttaattttattcttaattgcttctttcattgcaatccataaattataaccaaatgaattagtatctctatcattttttaacagtatcttgttgtaaatcaatactatcatccaaactatcatcttcattatcggcttctgaatcattatcatccctttcaagaattacatggtgtttaaccttattatttttgaatttacgtttagtagatgatttatagtaatcaccgatttgaacttcatcgaattcctcaacttcagaactgtcaatattatcattaatatcaatttccccttcttcataatcatcatcatcatcaaattccatatctgttgatgtatcggataatcttcttttagcattgattaaatctaaaacatttgaatcagctatatcacttaataaaataccattatccaatttggttgaaatattagctttgaatttaatcaaaatattaataatctttctattacctttaataaatgccaaacttaatggtgtaaaaccattcttatccttataatcaactcttgaaccattcataattaaaaattcagttaatttagaataattctttaaacatgctaaatgtaacattgtttgaccttctaaattacaaattgcccaattaggacttgaaattaaagaatttggtattctgatcatatttaaaaatctaatcaaaatttcttcatgattaagtgaagttttagataattctttaattttatttgacgcaactgccatccaatttaattgtaattgttgatggatttgtgttaaattatcagttgattgggtttgcgattgacttggtgaatttgattgattttcttgattattaccaacaattctctttgcaatatttttggcatcctctaatttaccattcatctttaatccaacaatttgtaaagccaattcaatcaattgtctatcactatcatcagtatatgtaaagatttgatgaggagcattagaatttgtaaaatcataatctggatcatcaaatgtaactaatacaggtccagcctgtgaagcaggtggtaaatatgtaacaatagtcgaatcagaccaacattgtgtagctaatgccacattactaccaaatttaacattcatacctggtttgaaattagatcctaataatgtaatttcaataccacctctaattggaccttgtgcaggaataattcttctgatgacaggtacctctggtgtatcaacatccatattcaaattaagatctatgcctaaagctctgttgatatcatcattcaaatctgtatctatttcactgattaaattattagagctacttgaactgttattatttttatgagtatttgatgcaccaaatatttcagcacctgataaactcgatatttgattatcataaattttagtttgctcaggagttgcggagaatacgcttgttgctgaagaaataaaattattattaggagataccgcatctgaagttaatggagaaacagcttcttttttaattgatattttggattcaccatttgtatcaacattactactactattgttcaattgatcatttataattttcatcgatgttgattgcggttgagagtgtgtttcattatttaaactttcaaagaagcttgtggattcaaattgagaccaaggtcttttttgtcttttagtttgtcgactggattcatcacctaaaatatttgaagggtcaaatgagaatattgaagaaaacatacctgtcttatttttaggtttaactgaagtgtttgatgcatttgtatttatatttggaattgagtttatatttgtatttgtattaatgttcatattcgtgttcatattggtatccgtgattatatttgtgttattaatattggaagatatttgcggtattgttttctttgaatttttagataataaatctgtagcaataactgtagtcgaagtagctgtagttgctacactcatatcacttgaagagtcattcattgaagtaattgaatttttatatgccattttggtatctttatttttatttgagaaatcattcgaattagttgttgaagatttgtgagactttttcctatccattattaaaataggggttgaacaaactttaccaacaattttattattttgatcttttaaaaatattaagattttaaaaccattagcttcttgatgatgtcttgaataacaaacaattcttgataataattctaaatgacgttcatttgaattaccatttgggggaggaaatgaaacaatttctttactatttattaatattgctctctttggtaatgttacatcccaatttgatgaatcatctagtaatccagctttcctacgagaagctcttttcaattctcttctcatacaacgtttacaaacattgcaggatttgactttattatcattttgttttgaaagttgattagtttcagatcctataacaaataaatccatatataataaatgttgtttaatagattcaggtatactattatcagccagtgtaaatttaggtttagttattgcatctcttggaatatgaatcaaaaattgtggaggtggaggggaaactgatatttctaactttatttgagtttcaactcttgaatttggacataaatcttttaatgataatttataagggaaggagtcatccgatttgaaaaaagcatcttgatattcttgtggtaatatagttgttgtaacatcagtatcttctggattagttgttgtttgtgcttttgtgtagggaaaattaccaacattagaatgatgaatatattttgaatcagcatttaaaccaaattgtattttcaaaagttcatcctttgattcttcaaataatttaagttcttttgtaggtgagatggttggagtctcaagtactgtcattgattccattggagattccatatctatatccatttttaagcctttatcatcatttgaagaaatattttcttttttaatagtagtataatcattattattattaatgttatgattagcattattaatggtattatcattacttgttttcgttgtttatattattaatgttattattttcatcattattatgagttttcttagcatttgtagcagtattatcaataaaatctagtatttctccagtttaaacattgagggtctagaaactcatccaatacttcatcattaaatgaagataggggggagttttcacgtttaacaggataagaccctgatgagataaaagtcataagggtatccatggtatataagttgatgtatagtgtaagagagagtagaacaaatagattccaaacagagtaaatattcaagccaagtcttaaactcttgttcttattcttgttctcgttcttattattaggtcaaagtcaaaaaattcaacaaaactgccatcgagcgacccataattttttcaaatttttctcactttttttttaccttatgtcaccttcctattggggaagtatttcattaccactttacataatttacaattaattaacttatttatacactttattaactattaaacatcaacatcaacatccacatctcccggatcaaccacttcatctctatctcttgatgatgacgacacccttcgtttaaatctcattccttttcttgttccccttttctttccactattttgatctatatctcttcctctacttctatccctactttcatctctacttccatctcgattatctgactttagtcttttttcaaatctatcatacctttcatcagttttacgtgatctcgatatctcaatatgaatccccctttcatatccacaaatatcggcattacctaattttttaccttctttataatcttttaaaactgttaacatatcctcctcctttcgaaattcaacaaatgcatatggtcccgatctgttggggaataggtgaactttctccaattaaccatattcttcaaatactaacccaatatcacgcgcactaacatgatcatagaatttagaaacgtgaagtgttctgattgttgtagatgacgaaggtgatcgtattaatgaggaagacgatattggtgatggtattggagatgccaatgacgtaactgttgagtctataggaggaggaggaggaggaggaggaggaggagaaggaggaggaggtggtggttgtagtaattctgaatccatgtcaattgtgattttttatttatagtttatctctatttagtaattgtatcttcacttgaatttattataggaaatacctttcttaattttcaattttccaattacaccaatgttataattatagtatcagttattcaagaaaatggagttccaaacaatagcccgcaatgcatcattaagatagtaacatatatatatatataactagtttccgcgtgacgaacctaatcgactcttttgtcatttcccctaaaggggaaactgacgcttaaagcgttgggtttggtaatttcaatttccctacgggaaattttgacccctacttactactacatattttatatttaataggaatctaatattaacaaacgtcactacaatagtaaacctttgagtctgtaaaccgtaaagaatccattaaatggaatattaatgtaacatgaaaaaatgggtacatgaattttagatacgcgtttacgtaatcaactatcactataactatttgaaaagcgttaaaatcagcgttaatttaatgtactacactttccaatctcttccaaattaggcgtaaatagtaccatatgaaagagaaaatttttctctacaaaatatcaaatatcgttttttagttaggttttcaaaaaaaagttatcactattttaatattttttgctaaaaaaaaagagcaaaatttgaacacattaaatcataacatttttttaaaaaaacagtttcacccataatttacatcagttaataatttaaaaacacatctacaaaatgagtttctaaacattaaatgttgttaacaaaaagtaacaaaaaagctagcttgaaaaatttctaaaaaaaacgtccaaaatttactgaaaactggatacttaaagtactttaccaaattgtgacaagctataagtagtgtcattaaaaagagattatgacgaactatatgctggatttttcaaaagtatacctgggagggtgtttgaaagagctagagcctgttaaaagtggtcaaaaatggacaaaaagtcaaaaaactaaaaatgcctttcgaggacggaggaaagctcccatgatcccaagaaaattaccaagtaaacttcagacaactacaaatctaatgaaccattgagcgtgtttcaaagactcataaagaaaaagatatgaacgtttgaaaaatcgaaaaaatcgacttcaaagggctataactcgataactagaggtcagataagaaaaagggctacatttgttagtgcggaaagtcccaaagatgttgttcaggaaataaaaaaaaatcgcggtttttagcgtgataaatatatagtagtaagtaggataatgatcttataagagaataacgtaattattttcccgaatgtggtctcagccgcgtcgtagttgaacttaagctttttaaccaacattttgtatgcatgctctaagggcccacttaaccacacctatgtatcttgttgagctagtcatcaagacagtgataaggttttggaattatcaaacttaagaagtgaattatcataatcattatcaatttccttatggtacatggaagaggtaatgccttatttttcaaaatgtcattacgtaacaacatttaagtatacccctaatgaaaaatttatcttatatagtcttcaaataagtataacatgaaaaaaaaatatttttttaaatttcaatcattaaatttcattaaagttcattaaaatttcaatctccaataaacaataccgaaatgccaaacgaaatacaatttagagtaattgttggatcttatgaacattcattactatgtttatctgcaagaattccacttattgaaaatgataaagacattagaaaacctcatttccaaacaattttccattttcaagcacattcattatcaatcagatcaatcgatattgctaaacgatatcttgtaactggttcaaatgatgaacatatcagaatttatgatttacaaaaaagaaaagaattaggtactttattacaacatcaaggttcaattactaaattattattttcaaatgaattattaaatgataataataagaaagaagaagataatgaagaaaatatttcaaaaaatgaaacaattacatatccatcacataaaagtggtaaatggttattatcaggttctgaagatggtaatataattatatggagaactaaagattgggaaaaatttggtgttttaaaaggtcataaaggtgcagttaatgatatttcaattcacccaaccggtagagttgcaatttcagttggtgttgatcaaactgttagattatggaatttaatgactgctaaaaaggcaagcagtttaaaactaagaggtacttatacaagaggtcaagaagcaacatttgtcaaatttaatttatcaggtgatttctttgttgttggatttagagatagattaatgttttggaatacaagagaagctaaattaataaatttattaggtacaaataaattaacaattatggatattaaatttgttaaattagatgataataatgaatatttgattattgcttttagtaatggttcaattaatttatataatttcaatttatcattatttgagatagatgatgttaaaaacattgatggtggtaatttagttaatataagggaacctgattttaaattattaggtcattcatcaagagttaagggtatttcaatttatcaagaaattaatgatggtaaacaatttaattttatgacatcaatttcatctgatggtcaaatagttatttggaatttagatactaaaataatggatcaagttgcagtttatacaactggtgaaagattaaatgttgttacaacaattcaagaatctgttgaaaaggcagatacaatgaaaccaatttataatcctgaacttgatgataaattaaatgatattgcaactgatagtgaatatgagagtgatggtgaaagtttatctcatataatgaaaggtcgtaaaaagaaattatcaaagaagaaacaaaagcaagaaagaaagaaacttttaaaagttgaaattgaatcttagtatgtacattttatgtctacatttgtaatttttttttttcgaattattactatattaaaaaggatattatataaagaatgttaaatcaattaaattagtttagtttatttaattagtaaaaagaatattagaattttggtttgtttaatcttgcgacatgatgtttgtaaagatcttccgccttcttccagacaggtgcagttgccttgtttggtaattgctttaatgaaggtaataaatctctagcgaaaaattcagaagattctcttggtaataatgaaggtaaatgatcaattgaaataactgataattttggacctttagttgtttcaactaaaacagttggatcatcaaattgagttgcaattgtatagacaggaactggattatgaggattagttgtatcagctgagacatcaacaatagttcttaattttctattttcattatttaataaatcataattaataaatggtgggattggttttgataaataaatacaattgatgaaaatatcagaatctgcaatttcttggaatggaccaccctttttagtttcattcatatcccattttaataaattagattctggaataccaacttttgtacaaaggtcaattgcacctgaaccacatctacctaatgcaccaataattaaaacagttggatatttaccagtttttttgtgagcttttgataattcagttttgacatgattaattaataaatcttcatttggataaggtgaaacacctggtagatttttagaatctgaatttaattgtttaaatgaccaatctaaaacacctaaagctgcacctgcaaaacctgcataataaccaaatgctgcaactcttctaccttgatcattttctaaaaactctaaatcatataatgtaccaccaccatatgggaatcttgataaaacatcttcccaaccagcttgatttttataacaatgagcaaattgaatatgatcatgaattaatgggaaagtttcttcaggtaattcttttaaaccataaataattctattctttggagcagttttccatgattcgaatggaacaatttttgcaccaactttagcatattcttctgttttaaaagtagattgtggagcttcttcaacataaatttcaaaatttcctgtatctaataattctttaacagttttaggagtgagagcagctcttgcttctcttggtttagtttcagctcttaagtgaaggataattttgtttccagccatagttgtgttttgatgttttgtttagatagactaagttaataagtgagtaaatgaaaaaagaaagaagaaacaatataaaaaagaagtggcaaatgaaaaactaaatacaaaaaaaaaatatctccaaaatattcacttatcttctgaaattgactcttcgtactgtgattcatcgaaattaaacaataatgactgattcttcaaaaaattggtaaaaagagcgcctacacagaattacccttttggggatacaatgctgggtttcggaaatttagagggaatttttaagattttggggtaaatagatgtctcaaatttgcgaaatttgctaagagttgaaatctcatgaaattttggaaattttggaaattttaaaaattgatttatattccccaattaggaaggtgccttgtcttaaattatcattctgctcatccactttggtttattattcctcaaatattgatacaaaactcacttaatatgcccaatgatagccctaataactctatgctcacattttcacctctcttaacaactaaaagagtacgagaccattttcaaacacctccaaatccctttaaagacacgccaaaagatttaaatatttcaaataataatcacaaccaaaacactggtaatacattactattacctaactcatatatccatcagtcgtctcctcaaaactcaaaacttgttaatcttattatttctgaatcgatacctgatagtaattcaacaattatacatgataatgaatccaatactaccaaacaagaaattaatagtaattctaataatataaggaccaatatgaccgccgatgttactggacttcctgatatgagtaatatacatgaaaatagtacaacatctaataatattaacccaattaccaataataatggtaataataataataataataacaacaacaacaataataataacaacaataataataataataataaccttaacaacaataataatagcaacaccaataataacaataacaatacatctcataataacctcgaatcttcaacaattgtcgatgctaatcaacctttaactcaagctgataaattaagattgtggagacatgatgcattgcttcaacatcattataagacagcagtttatattggtgataaaatcttgtcattaactaatgatccaaatgatgctttttggctagcacaagttcattacgctgcaaataattatcaattagcaagaaatttacttactggtcctaaatttgaagcttctgtaggatgtagatatcttgcaggattatgtctttacaaattggataaaatggatgaagcattagatattattggtgaagtaaatccatttaagaaggatcactcaattagaaatccagatgggggaatcaaacttgaagcttcaatgtgctatcttagaggtttagtttatacaaaacaaaataattttgataaggctaaatattgttttaaagaagctgtactggttgatgcaaaatgttttgaagcttttgatgtgctgatatctaatcatttgttaactccctgatgaagaatgggatcttttagaaaatataaactttgactgatgctgataataataacgaattggttaaacttttatacactacacatattaataaatataaaaagttgaatttatatgaagatgccaaacaaagactaattgatgaatttgatttgggtgataatattgatattttgttaagtcaagcagaattattgtttgttaagtgtaaatttcaagattgtttagatttatgtgctaaaatcatcgatcgtgatgaattaaatatctctgcgttatctaattatttaagttgcttgtatgaattaggtggtaaaaataaattatttctgatggctcataaactagctgaaaattatccaaatcattatattacatgggttgctattggtatttactatttttcaataaagcaaataacagaggcaagagtttttttttcaaaagcttcaatgatgaacccaaattttgcttcagcttggattggatttgctcatacttttgctgctgatggtgaacacgaacaagcagttagtgcttatgccactgcttcaagattattccctggtactcatttacccaatttgttccttggtatgcaatatttacaaatgaataatttcaccttagcctgggaatacttgagctattcatattcaatttgtccaactgatcctctacttttgaatgaaataggggttttaaattatcataaaaatgaattacagagagctgaagtctatctacgtcaagctttaatatcatcgaaatcattagaatatggatcaaaagcttggtgttcaattcattgtaatttagctcatgtttatagaagaatgaacatgtttgaaaaagctgtcaatcatttcaatgaagttttaaaaatagctaaaaatgatgtgaatatttattcaacattaggtttaataaatttaaagcaaggtaaaattgcaaacgccattgaatatttgcatacagcactctctatccaacccaatgatgcaatggctaccgatcttttagataaggctttggatttgaatgctagaattgcaaataagaagtttttagatgaagcaatgaaaagtacagctataaacaacttcaaaagaggtcatagtaaggtcacagaagttttaaagtcatcaatgagtaaaagaaaaatatctggaaacctttcaaataatctaagtgatgagttgatggatatagaaagcgattagttttattattatcattatcattatgattaaataaattatataatatttgattcaattcaattcccttgagcgtaaaatttctagctgaaatatggctttgtttgccctttctacaaaatctaaactttttgatgattcagccaatgatttaagagtatcatgaaaccccattttcattaagattttgcatctaattaaaggaagattcagatcaccatctatattccttccatcattgacgtaaggaatatcatttttcaaatcaggtgaatttaataagtttatgatgatccatgcaatacctgttttgatttcccaaaactcatcatttagtatgtaaggcgtctttggtgaatttaataaatatgataaatgttttaaaatattctttttacatataagtgctttaataaatgttgcagatgtagataaatgtatcaggttgtatagtaatgtaattgttaatgtatttgatttagattctttaaggaaatctccaacgaaatcaacaaaattttgtccagaagaaaatctttcaaatgctttatttattttaacagtatctgatatggaagtagtaagtagatttctaaagacattaaaagtttcaatctgtatatcgacgttctctgaagcagctaatgaaaataagcgatctaatgtcactatttccaagcatttagatttgaaatacatatcatcaccaaataatgcatttctgagtaatgccaatgatgcaatgacaatctcatcacaatccctatcatccaaatatttcttaataagcaacaatatttcatgaactttaaaatattctctagttgatgagaactcaatgatcaagttagatattataccaagtatcagaatatgaagtgatttttcagcattatagaaaccaatattatttaaattattatcaatagaatgaccagcttttaaaattttcaataatgcattactgagagtgtctgttgtgaagtatactcttaaaagaggtgcagatctagataatgatttcaaaaatgagcatgccgcaaatgtcagtctattagatgtttcaagtactctcaaatataatgagcttgacaagtttggctttgaaataattaatacatgttcctcgagtattttcttcactaaaacatcacttgtaccatttgcaattactgatttacattcatcattgattactgccatgtaacttaaacatgttaaatacattgcaaaattataggcctgtcgcatactcattgcattatgacattttgaagattctaaattaatgcaagtttcaattgtcttctcaaaatgtatgtcatataacatttctgcaaattttggattaatactcaataattgaacaatcaatgagatgggtggtaaatcaaatggtactttaaaatcttttaaaatcatttgagttcgataacaactttcttccggtacataatctaatcgaaatactcgtaacacaacaagaaagattttcttaacaaatatctgtgaactaaattttgtaccattgaaagcagcaagtttgacaaaaaccgaagaagcggcgcatactacatcaaaatcagaaacttgtagtaagctaagaataaacttttcagcagtaatatcaaaataaatgccaatttcaatgtcaggattagagaacatacgtgcaagaataaataagtaatgtgataattgttttgaaatttctttgactttataatcaaaactaacaggaaatgtggaatgaattatctttgccttggtatcaatattctttgatgaatattcccaaatatcagtatagtttagatgcaaaatttccaataattgtttaacgttactttcatcataatagcaaggatccactaataaaaaaaagtttccaaagatcttacggatatgaggaggtgtattcaaatcagcattaaactctaataaaattttgacaaatgcttcgatgtttttccactttattaaaatgtaacgtatttatgtcattattattgcaatattttatgatatgaaaacaacacaatgctaaagtatcaccatgtattgccaataatgttatttcgataatattatccatagtaatatttaattcttcatttgtgcatttgataggtattttgaagttatctaagaaatatatcgtatttgacgctcttatctctggttctgttttatttgttaggagagttattatttcattatacaatttggtcaactcattaaaatctcgtgttttgttcaattccttacaaagtgcttcaaactctattgaatggtgtatcatatttagtgaattatcctttacaaatgagactttacttcgataataaaaattaacaataaagagccggggtcttttattttatctcctccttctaattgtaatgaagcaccgcactgcaaaatctttgatgcgaagtcagactgatgattatgtcaggtctatagatggttagtttgtatacgaagtgttagaaggatgggtatatgtgtttttacactgtcctttgtatattttcatatgagggagaaataaaaacatgttttacacataaaacaaattatcatacattaatgatattattcaaatgtattttttcgtttttgtagatttctcttagttcttttcaattttgtcttgtttcattgtgattgggtcttgataaacacccggatatctatgtttataatactgaaaattgagttcatgaagtatatcccagatagatagctagaaactataccatatacttattgcatgaacaaatttttcaaactgattgaagaactctcacaaaaaaaatatttctccatgttgctgaaaagttcggccttaacattgcatttttaatatctactttcttttgcaaacatagaaaaccagacatgcctagggatcccttgattggtatagttgggaaaccatccagtggtaaatcctacaactcttaactctcttacagacgcaaatgcgaaaatgggatctttcccattcacaactattgaaccaaatagagcaacaggttacttaaaaattgattgtgcatgtgccagatatggtaaacaagatttatgtaaaccaaactatggttggtgtgaaaatggtaaaagacatgttcctattgatttattagacgtcgcaggtttgattcctggtgcttctcaaggtttaggtttaggtaataaattcttggatgatttaagacatgctgatgcattaattcatgttgttgatgtttcaggaacaactaatgcagaaggtaaagctacaagaggttacgatccattgaaagatatcgaatggttacaagatgaaattagattatggattgaaaataacttaaataaaagatggggttcaattgttagacgacatacatctacaaaatcaagtatcgttgatactttaagagcacaattcggtggttatggtgctaatttgagtttggttaaagaagcagttgattctatcgaaggtttaccacctttagaagaatggacatctgaatggataacaactgttgtgaaagcatttatgagatttaaattcccaacagttttggcattaaacaaaattgatcaccctgatgctgataaaaatgtctctaaaattttactcaagcatccagatactagagctgtcgttacaagtgctataacagaaatattcctaagaaaacttaaaaagcaacattatatccaatatgaagaaggaactgaatttgttgacacattagaagatttacctgattctgatttgaaaccattggatgaaaaattacaagaaaaaattgaaaacattagagatttagttttatatagatttggttcaacaggtgtcgttcaagttttacaagaagctgctaatgttttagatttaattccaatttttactgttagaaatatcaattcatttacaggtaacagtggatcaaacgttttcagagattgtatgttatttaaaagaggtactaaagttggtgcagtcgcaagaagtatcatgggagaggttacaattgctgttatagaaggtgttggaggaaagaggatttcccctgatgatacaattgataatggtaaaaatgatatattgacatttaaagttgcaccaggaggggttgttaacaatgaataaacgaacattttttttaatagaacgccaatacgcatagagagtaaataattttataattaagaaaaataagattgaagaaacgaaaagaaataatttattaaaatgaaaatactaatcaaaagtaattctaaaaaagagaaacgctaagcttataaatgtatttaaatgtaaaaatgaaagcaaatatgattataatttatatctgaaattaacattttctttatcagttaaatctgcaaattcgatattatcaatatgaggtaattctaatttaccttcagcttgaagttgatctcttctcttattttcagcccaataattgtagtataaccaaaggttaagtacaacagaaactgcataacagacaaccattgaaatttgaccacctctatattctggtgcttgttttgcaataaaagtttgtggaccaaccaagttaccaacacaataaccaattaaatataatgcattaactgtaatcttcttagtatgaccagcaacatttgaagtaaagcaggataaacaacaaatcataccaacaggtgagatatagaataaatagtaacctgcaagtctagcatttggagaatcaagtgcaaatgctaacatacaaacagcaactaaagtaagtatcattgaaccagctgaaatggctaatttatgtttgaaatacttttgtaaataagcaaataaaatacaaccaacaagttcaactgcaccacctggcatgttcattaacaaactctttgttggtgaataaccaaaagtttcagataataaaatggaaccaaaattagtcaatgcaccatttggaatatctgttgcaactgcaaagaagaaataaatccatgtattaacatctaataatgcttcctttaattgatggaatttaaaatgtctattaccgaaaccttgttgatttgatttaattctaacaacaacttgtttcttttcagtttcatttaagaaccatgctttaacaggtaaatctggaatatggaagaaaatcattataccaacagagatagtcatacaaccaataacaataaataaaactttccatgcatccattgaataagaaccttgacgaattgctaaaccatatgcaattgatgaacctaaaattgtaccaaaaccattacaagcaaaccaataagcagttcttaagaattgttcatcagctttataccattgaccagtgatgataaccattgctggagtaattgcagattcaaaaatacctaataaagttcttaaagtaatgaaacctgcgtaattagcaggagttgcatgtaaacataaaatagtaccccataaaacaatgaaaatacctgtcattttagcaactgggaatctttgtaatgccatactaattgggaattcaaaaattaaataacctaaatagaaagaagaaccagcccaagaatattgatcaccatgcatattataataagttcttaaacccataattgcagcataactggaagaaactttatccatgaattgtaatgcatataataaacaaattaatggtaataagaaaatatcaatttttcttaataatttctttgcatctgcatcagttaattcaacgtcttctgtatccagagcatatttcattgcttcatcaacatcaccagttatatcgacaactctaccattaattgatgtaatttgtgataagatttgatgagtatcaatgttatcttttgaaaatgttgaatgtaattcaacattctcttcctttttctcaatatcagacatttttgttttaacaaacaacaaaaaaaataaataaataaataaaagcttaaataatcttaaaaaaagcagataggaaaaaaaaatgaaaaagaaaattatcaatctttttatacaattgaaggaaaagggtgaatcaaatttcttatcagcgacctataaagttacacaatatagatatcaaaaaaatcaaaagaaaagtgattttaaacttttactatctaaaattgataagtgatcaccctatatagtagtaatcgtcagtttctgataaagtgtggcagggtattgataagggtaagctgccatatttcccgataatatagtactaaacactttattcggtagtctaaatattttacagaaggagttttcaattttattggcatatttgcggtatctcccatttgggaaagaccgattgataaatttcttttttttaaatttacttttgtatattgatatggtattattgtttttgaattgatagtttacgataagtgaaaactttaataaaatggtaagataataggtattgttaattatggctgtttgattgtaaacccttttctttaacacaggataaagattatggggtaccttaaacggagaatatcaaaattttaatagtatgtatgaaaagtgataaatccgccgagaagtgacgtctgcggaacttccgaataaggcaattcttgcctggaccctgaatagtttataattattcaaataacccgtggaaaaggatattttaagtgtgacgttcacgtttatattatgattattgtgcaataactctcaactatttaatgatagtcacatcatactatttaattacacagatctattttaaaacagttttataacagtaatttcatctttttttttccaacaaacgaagtttagctttatacctgcttacataatactatctactattttcaaatttgttgctggaatggagaaattgacttattcagaattcaccgaatgtcggacttttcataaccgggtgtgttggtaacatgaatgattttataaatgtgattcgatttccttcatgaatgttttaattaatcaaaattaattgatacaattcaccttctttcttttaacaaacaaaaaatggcaaaaagtcacacaccacgttgtattcttattagacatggacaaacagaatggtctaaaacaggtcaatatacatcaattacagatttatcacttacaccatatggtgttaaacaaatgaaaatgacaggttcaaaattgatcggtccaactaataataagttaattaatccaaatgatgttaaattaattatcacatcaccacgtaaacgtgcaattgaaacaaaagatttattatttgagtcaatcaaagattctcaaaatataccaactaaaattgatgaaaatattagagaatgggaatatggtgattatgaaggtttattaacacaacaaattattgatttaagagcttcaagaggattaccaaatgcagagaaatggaatatttgggaatatggttgtgaaaatggtgaaactgcagatgaagttacaattagagttgataaaataatttcagaaattagagcaattcatgaaaaatatttaaataataatgaaaattgtgatattttagttattgctcatggtcatattttaagatgttttgctgcaagatggattgatgtccccaattaataaaaaccctaaatttatgcttgatgcgggtggtgtttgtgttttaagttatcaacatcataatatcaacgaacctgcattatatttaacaggtgcatttacagcaccagttgaagaagaaggtgcagatatttagaaggaggggtatactatattattatttatttatcaactatataaaaattatttctttaaaacatttaacagttcgttctgttcaaacgataacacacgttgatgtgagtgtaactttcttgtcgggtattcacctgcagtgattgtgactcttctcaggtcatcatatttacgttggggcggtttgacaaagttggcaaattctgaaatacgtgtctttttcactttaagtttattatttagatgttgatttacattctgaattgttggtgaagggattttcacatcataattgttcaattgattttgtaattcatcaaatgtgttattgaaagaataattaaaattattatttggattataatcttcatcaatattgatactattatcaaaactattatcaacattggtattaattgttaaatcattattaaatctatttttcgatttcagtatagatttaattctttgttcatttgtattttcataattactattaaattttttcaatgaaaatggtaatgacataactgatttatatgaagatgaaacaacatcttcaactttattggaaatatcagttgttgatgtctttttgattttactaaatagtggttgtaaaatattttgtgttattgtatttgtactatcaacagtttcattattattttcattattataataactatttgtatcatttgctgtaatattatgatttgagacattttgaatatctattgaattatttgattcattaatatcgggtaataaattaaacgaaatagaatttgtggattttttatgatttaaaagattgatattattattactattatttagttctccacgtagtgaatcaaatgaaatatattgatgtaatttattattgttattgttattaatatttgtgtttgtatttaacgagtgatcaaaatttttccttttctggaatagttggacttgataatctagatgttgaatatggtttagaatcatttaatgaactatttgatttcctccaaaatttagatgctgtgttattgaggttatcttttgttctttgaaaaaaatgcgatgctgaattatttgaagatgttgataatctatctgtatcattatcttggtctgaatccaacattatagagacattatttgaatcataatttttggtcatatttggagttaataaagggtttgattcaatatctactactgatgaatcataatttagagatattgttttatctttatttatattttggaaactcaataggaaaacacccatcatgactaaaactgaaccaaatataagtagtataaaagttccataagataattgactccattgttggaaaaaaatcaaactgttagcaattgttgttatgttataaatgaaaaacactaatgggtataaaattgaagttgaaacatttttcaatcctttatttaataaaaataattgacttatggctaatgtaagaaataatgatacaatgaaataagttgaaacattatttaatgaagataaatcattatttatgaaagtatgaactaatatttcaattgttgatttagctaataaaagtgaaaaagctgataatatacctgatataataccaaaaatgattccctttatttgtaataagatatcagttgggtgattaaatagaaaagaataatacctatttgattgtatgttcatttgatttcgtattttcaaatcaatggtaaataaataagttgatagtaaagatataattaaaattaataaaccaatccagtgaataaaatttttatttgaacataagattaaaaactcattcaaatcataatttggttcagataatgaataagcacaataagtatttaaaaatgcacctattgaaattattattgttgcatataatgaattatcagtaaatggttcatttaatataagtgaatgaaatattgtattaaataataaaccaattgattgtaatggagataatattatcaaaggtaaagaagttatttgaattgaagatcctaatatattagcagttataaataaaaataaaccaaaatgccaaagtgaacgattataaattgaattatttgtgatattatcagttgaaaggtatgatttacgttgtaatataagaccaattgattgacaagctgacgatatgacagctgcaatacatcctagagctatatgtgatgttaatggcatattgtctctctctctacagctaaatctcaagacacaatagatacttgttttatatagtaatttaagtttgtgaagtatattcggtattattagatagtatatatcacacatttttaacagccccctacatagacacatagacgcgacacaacaaatgtcgtgcgtacgtaatccaccgacgcgtctactccatttataaattttttttaaaatttctaaaagtaggcatttccgtaattccaccgaatatttataaaatcactatgcgtcccggagatgaaagtcgggaccgtggccggggttataattatgtgatttatttatgtatgggatgtatatgaggtgtaattacatcaagggtttattagtgatgtagtatgtaaagaaatactctataccatacaaaactgtctacacactaataaacacacagttatcagtgtatacaccattccactacatgtaacaacaacagtaaccaacgataggacgtgtccgaaacggattgctcgctctagtgggaaaaagaaaaaggcaaagcgcaggaagaactgggctctctctataaaacccctccctcttcccccggggatgaggaaaatgttgacggcgggaatctttactggggtcttcccccgtaagttgtcaattgatttacccactatattctcaaattgtgaaaaaatattagcattttctctgggttttgatggtatttttttttctattattgtagctctcccaattattcccctttcttagtagtaaaaatactttacaatcttttaggtgattaggttttctgtattacacaaacaagtttttatattcacatctacctgatataatgttctcctctttatacaagtcctcccttcgtcaagcttcaatgtcttcaagaactatggcaactcattcccttccaaagaaatatggtggtaaatatactgttactttaattccaggtgatggtattggtaaagaaattactgattcagttagaaaaattttcgatcatgaaaatgttcctgttgaatttgaaactattgaaatgtcaggtttagaaggtcatgaatcaaaaattgatgaagctgttttatccttaaagagaaataaaattggtttaaagggtattacttatactccaactgatcctttcattaaatctcttaatgttgctttcagaaaagaattagatatttatgcttcacttgttttcattaaaaatatcccaggtgttccatcaaaattaaatgatattgatttcgttttagttagagaaaatactgaagcagaatattcaggtttagaacatcaatcagttccaggtgttgttgaatcattaaaaattattactaaatataagactgaaagaattgcaagattcgcttttgattttgcaaagagaaatgatagaaaattagttactgcaattcataaggcaaatattatgaaattaggtgatggtcttttcagaaatactattaaagaaattggtgcaactgaatacccagatttagaagttaaagatttaattgttgataatgcttctatgcaagctgtctcaaaaccacaacaattcgatgttatggttactccaaatatgtatggtgcaattctttcaaatattggtgctgcattagttggtggtccaggtttcgtacctggtgcttcatatggtagagaatatgctgttttcgaaccaggttgtagacatgttggtttagatatcaccggtcaaaatgttgctaacccaactgcaatgatcttatctgctgttaagatgttagaacatttaggtttacaagaacaagctgatagaattgctaatgcaactaaggaagttttatcagaaggtaaaaccgtcactaaagatattggtggttccgcttcaacaactgaattcactgatgcaatcttatctaaattaaattaaactaaatttaatttaatttaaaactcatatataattataataagttatgtccatttatttatttatttatttcatattccaattaatacaatcttataaggtataaaccattacttgattcttcttttttatctttttttatacagtttttttaacatagaaaatctataaaaacaaagtgtcacgtcaacatctaaaagctgctgataagcgacatgacgttaataatatttttttggaggctctgataacattgttaatttatgtgcaactccttactcctttcatcaaaacatcccgagaaaatggcattgataaaagaccccgacttctatattacattgaaaaatcatcaatttaaaactccattagaaatactacgtaaaaactttaaaaatctacaaaaatcaacagagaagaatcaagttcaaataactcattttttaaatgaaattcaaacaactaatgatacaacaaagaagaagcaattaattgatgaattgattaaagctcaagaatcttttcataagaagttatcaagtagagttaagcaacataattcacatgttgataaattattatacagagttaagagaattgaacatattaacaaactacacgaaaactactccagttggtcatcggttgatattaataaaaataaattacctttggaattggtaaatttttatagagaggagaataatctcatgattgttgattatatattatggaacagtgttttaatttcaactaatcctgaattagtagataaactattgaatattaacaatggaagtcattacaatgatttaagtaaacttatagattttgatattatccaacaagcactaagaatcaaaaatgatatagcagttaaaaaagatttgaaattacttaaaatgtggtgtgttgaaaatcggagaaagttacaaattttaagggattcaccagataataatttagaaaatgatatagaatttgaatgtgattttcaacattttttgagtttaataaaggaaaaaaaatatgttgatgcaattgtatatgccaagacaaatttgaaagatcatgatgttctacataaattagagaaattatcaaaaggtttatcaataatttggtcaaattatgttcttcaacaatatgaagaagaaaaattagagagaaataatgaagaatcatactattatacatcagtaccaagtgatgcagaattaaacaatactgaaaaatttaaagagattaatatgttacaatcattattatctgataataaatgggttgagttatctgaatattttattatgaattttaaactaatttatggaattaaccaaatccaaccatttaaaacattcctaaatattggtggttcagtactcaaaactagatcatgtaataatccatcgcataactatgataaatcagttttccaacaatttattggtacaaatatggttagttttgagaaattttacaataatattgaatgtcctgtttgttctgttgaattatctaatattttaaaaccattaccatattcattacaaacaaaatcaacattatttgatgatccgatacttttacatcaaaagtatgttcattcatttaaatcattatttatgtttaatagatcaatcttcctaccaattggtggggccgatgatcctgatagatgttttgatcttatagaaatctcaccaaagaatattcattttgaggatcataagcgttcaattgaagaagttgttgatccattaactggtacaaaacttttatttaaagattgtcagactgtttttcctacataaacttctcgactgatggaaatatttttttttattttatttttcactggataaatttttgctttaaaatcgtctataatatttttattgatagagtaacatatacgtttataaatggctagaggtaagggtagattatcagatgcattagttaaacaacaatcacaaacgaaacataatttttcgttaaaacgtaaaatggaaaaccgagatatacattattccaaagattcaaagaagaagaagtttgaaaagaaagaaattcctaaaattgttgaagaactaccaccagttgatgaaagaaaagtttttataccgtttcaatataatgatagaattttaattattggagatggtgatttttcatatagtttgagtgttataaaattaaaccttataaaaagtgctaatttgattactacatcatttgattcttatgaggaattgattgaaaaatatggaaaagaattgattgataataatttgaatgaattaaaggaattgggtgttactaaaatttatcataatattgatggatgtaaattaagtgaaagtttaggtatctcagtggggaataaaagagttggtaacaaaagtggtaaaacaattgaaattttaggtggattaactgttaataatattatttttaatttcccccatgttggacagcatatcaaagatgttaatagaaatataatcaaaaatcaacagttagttgcaaattttatgaaaagttgtattgaattttactctattttgaaaaaacaaagagatgctactgggattgttgatgaaaaaaaagattttaataggtataataaagacgagtatgaagaatatggcgaagatgtaggagaaaatgaaactgatggtaattccactaaacctattttgaataataataatttaaatgatactgaggttataacaataaccttatttgaaggtgaaccttatgactcatggaagattaaaaagattgctaaagatagtattaaatactgtgttcaaagatctggagttctggaatggagattttataaggattaccatcatagacgtacggctggtcttggtgaaactaataaacaatcacaaactagacgtgcaagaatttacaaatttgaaaaatttcttcaaagtaattcaaagagtaaaaagaatagagttgttgatagcgatgatgaagagtaagataaattcagagatatactattaatatatagcttatgtgtaacctttttaaatgttaaatcaataaacatagacttagactttttataacatacgatcaagaccttctattttctaattttaatacactgtggatactttatttctcaatattccatttgattaataaaagtatacttattatcgacatataaataatattagttgagtaggtattattgtttaatacacgatctatttataacttgctaacgataaaccctatttgtttatctcgttctgtaagaataagagccacttgcggatattgattattgataaaaccttgatcaataaataccaatatattaatgctcctctgtcttactgaatcacatcatcaagttacgtactggtggctaaccagcagtaacttcacgttcaattatattagttgtattgacctcttatttacctgagcctccagcgcacctggagatatgaacctatcatacctctgatacctttcccggtatgttaactccggttattatttttatcctagactatcgaccaccggagttactgtattgggtatggcccgaggtttaggttttaagttaattctagtactattctcataaatgacttcacggctgtaaatatacagcccctatcttatgaccacaattggtataatagggaaagaattatattattcattacattgttacagcaaataatacattatttccatggtggttccgatgaagaaccatatttgcgcttattgttacccatccaataacctaagacaaattaaactctaaaatccgcccaacgtaaaagtctaattgttccaagttggtattctcgcaaatcttaaaaaatacgattgttttttgtgcgacgaggaacttttcttgtacgggttaaaatcgggcttcccttttcagagcatgagattgcgattgatcatcagtcatgcataactcattagggattggaggatcacttattttctttctatatgggttttatctagtatgatttgtataaactcacgtgtagatattaatacagtcactctatagaatatttgacaacaatttagagtatagactatgctattcaacagtgacatgtcactcaactattgtaacttttgataataagctgtataattataatcttttttaagatatactctaaaatcatttcatttttggagtatttatttgtcaaatttgtttataaaaaacaccacacaaatttaaaagaattaatcataaaaatactgtttacagtgatatagctataattgcttttctttttgattcttaaaataataaggtgacgagattgataatactatatatacttcatataaccctttaaacaaaggtagcctttaaatccgtttttacaaatacataaccgtatatccaagacactgaaaccatagggatattcgccggaaaggaaaaaaaattcgatatacaatggcagattctttacaagagcaatcaatagagaaatctcagtttagctcgccaaatgaaaaaaaatgagaacaataataagtgaggatgagatgcatgaaaaaaaagggcttaataatgttcactcaatcttgatgaataacgatgatatggtaactaattctgatagtatgacatccaatggaacgcacaacttatcaatggcttcaactatgtcttccatagatgataaatcaacaaatcatatggaattctctcataagaagaaaaggtttagacgttcatataattgtggcccctgtaaacgtcataaaataaaatgtaatatgaaaaccccgtgtgggaattgtgaaaaatataatcgaatagatgaatgtctaaaagatccatcaaatccaccaacttttgagcaatcattagttaaacatcaaaggaagctgaagtatcttgagcggaagaagaaacttcgccaagaaatagatgcacaacatatgaaccaaatagaattaaacaacaaggtacctaaaccaaaagctgttgatggtactattaataaagaatttgatatagaaaatgctaattctaatggatcatcaacatatcataaatcacccagttttatatcgccaactaacacaataacacaaagctctttatcaagatattctaactaggcaagatttgaaagatacaacccaatttatagaaacaacaacaaacatcaactcatcaacccctgatattagtactcctttcttaaagaataaaatgcaagatatatctgaaataaacacagcaacaaacaatgaacacataaataaaattcaaatggacataagtcagggagcaaataattcaaacccagactattttcaacaaccagatatgttcaacttgaggaaacaaataggtggataccaattttcataccttcatgacaatttttcgccaccacagtcatcaccaatacctaaacagcagcaccaagttgttccactcccctcatcatcaaattacaccacaacaaccaaatacattacacactaatatgatacatccaataattccggtgcattttgatcaacctttcatgtataataatacatataaccaaccaccataccagccacaataccagccaatatatcaacaaaggtctataagtcagctatcacaacctaacaccatacatttaaatcataattctaattcttcatatggttatccttcagtccaaataaattcacaaataaattcacaaataaatccgcaatatcaatacatgatggtaccatcctccaaaccactgatgcaacaatcaagctctccgccaattatgcaaaataatttaccacaacaaagtcaaccacaacaagcgctaccaccattacatatgttaataaacaatgataatcaaaatgatcctaacacaacttatcctttaatttatgaaaaattaccaatgtatggctttgaaggagggaatattggaccaccaaatatgaaaatacagatgatgcaaccaccaaattcatttatcgatactgctggtcagaaaaattttgaatcggatagacttgataataatattagacccaattacagaattagtaatagtagttcgtctaatgttggtagtagttttgcagattcacaaaaatctaaaagctcaatgacaacttattcttcaattgatgaaactaaacaaaattaaaacaacatgcaaagtatgtatgataaaaagttaactagcaatatataggcttgcattatataataggtctaaaaacctgttgaaattcaaaataagtcattcaaaaagatatatagagctagtatggattgaagtttttaaattacagaaaatacatgtataactttatttttctaacaactatttaacattaaatttaatccatcttataatttatcttaaacaattcatacaatgcgttattatctattaggtgaatcgaatcattaattgtggtaggatcgatgatcaagattttgtgttctgtaataacgcgactttaaagtataatatcaagaaaaatgaaaataaaaatacaatccttcatcgtcatgacattcatttttagcaagtttcctttgtatacccacaataatatcaaacatgtcattctttaacaaaaatagattctctcgtagtagggatcaagaaataaatacaaatcaaacttcaagaagctcaactccaattgaaaatatttccaaaaatagtttgtcaagtctaagaactgagcctacgtcaatctcaactacaacaacaccatcattatcacaaacgccattaattaaacgacaacaacaatcatctccaacaaatttacaaaaccaagttatcaaaccacaaaccaatgatcctaacgttttacgtgaagttgaaaatttaaggtcgtcctacagacaacagaatttttggaaatatcatattgtgaagatagcaccttttgaattttatatgacaaccaatccagataaaaggcatagacttgtgcgtaatgcgcctagttattttataaaagttgaacttccaaatgatccgaaagtaaaaattaagggaagtcaagttgataaagggtatagattagtttttcaacaacaacaagttattggaattaatgggtttgatggaaattataaaccatttgtaattgaaaaactgccagctgataaaggtggtcattttaaaattttgtgtcaatataatgagtttcaacaagactggaatattcataataacatcaataattcaaataaaggacattctaaaaacttgaatttccaattctcaaatactgacaacaataaggatgatttatatgatactaataacaatcttttactattggatgattacacaatgggtgattttttacatgtttgttcaataaaagagaaaaagaaatcattattcattaaaaacaaaattgatggtattaaattagctaaggagaattcagtttactttttagataccggattttttaagaaagtgaaatggttcgatcccgtaattgctgttttcagaccatgtaatagaaatacaaaaaataagattgctaaatacgtgctgttgaactctaaaatggattcatctaatgggaatactaaaaaaatgtttagttccagcagacttactgttgatttttccaatatgaacattaataataaaaaagagggtgtctcagatgctaatgatgatgacgatgatgaagattacgataatgatgatgaggataatgatgaatatgaagatgggtcagataatgttattgatgaagattcttcatcctcttcaaatctttccaaattttacacagcaaaagatggattgtttagtcgacatccaaaagatgattcacctaatgattataaattaggttggttaacaatttatgaaaagggaagatattttgaaaaaatacctaatgggggtaactggcaaatggttgttggtatgacatttgcagtttcttttgaaaagcttattgataagtatattaaagaaataaatgaacaatttgatgtataatttgtacacttaaaatttatttaccatgtgtatatttataaaatttaagaaaattatcgatatgcatgatgactgataaaagaatttgatcccaaaatcatgtaaactttcgtgtgtatagataaaaccgaaatttcaacagagtttcaatatacacatgcatgcccatttcctctcctttcattgacgcatagacatggaatatcaaacactaatttgttattctacccaatctggaacttcagaagatttagctaatgcattttcttctgagttgaataacctaacgaatgatcaaaatagtagtataagtcgaagatttaaatagtttttcaactaatatcgatgaatttaaaaatgaaatttcaaattataaaatagttatatttttcattagttcatatggtgaaggagaaccatgtgatgattcagtaaagctttttgaatcattagaaaaatatgttagttctaaaaactccaagcttgatccactaataccatattactcaatatttggatgtggtaattcatactatgatcaatatcaggctgctgcattatgttttaaaaaaatgttagatttagatggtagtcaacaaattggtgactttgggtatggaaatgaggcaaagaatggtatatttgacgattacacagcgtggagttttgactactttaacgttttatcacaatttctagatgttaagtttaataaaattgaatcatacaatcctatgtattctgtcattggaatataatgaaactaaaccagaaagaccaaccaatccaccttatcaagaacttaaaccatttattgcagatataaatatcgattctgtaaaaaagtatggagatgattacttagaatttgaagttaatctacacaaaaataaaagtcgtttgaaatatcaaacaggggatcatgttggtatatatccacaaaatgatgatgaaaatgtaaagaaagttcttaaaattttgaaacttgataaaaacattaaaaacgatgataaattaaaagttgttcctgttaacagaatggaatccaatagatggttagacttgacttttatttcatattatgatttgctacttaattctgtcgaaataaatggagtgcttaccagaacatttattaaaaacttaatcacatatttcatgaagaatggaaactgtgatagagcaattgaatcaatgttatatcatccgctgaagttttcaaaactaacataaccgataaacgaattacactaataaagttatttgaaaactatgaaatacaacaagatgactatgacaccataccgttatcattcataatggaaaactttggatatttaaaaccaagattgttttcaattaccacaagtgattctgttaattctgatagtgttggtgttatcatgaaacttgtcaaggaagaaaatagtggattctatggagtttgtagcaagtttcttgaaaactattatcacaggtaagattgaaaacagagtacctatatttattagaaaatccaaatttaaattaccaatgacactttctaagccattggtgtttattggtgcaggtactggtattgcaccttttagaggatttttacaagatatatgttcacaatctcacaaattaaaacaagttgaaaagatagttatattctttggtcttaaagaattaaatgagaaatactggttatttgcacaagatattgaaaaatttcagaaaattcttggcaatgaaaaacttgaatttgttcacgtccaaagtagtatatcaagagagtatgtacaagatgtgatcaaaaaacctccattttgtgaaaatatatcgaattatctacatgaaaagcaagggaatatttttatctgtggagataaaagtggtatggcagctggtgtccgtcgtagtttagtttcgattctaggtaacgataatgtcaaagacggagacaaataccttagatacttacagagtatgggtcgtttcaaagaggatgtctggtagttgttatgattagtaatgtgtagatactgtttataaagccacaattaacatttcctacccgtttatacggagaacaatgagctttgggagttttcggacattattttttttttcttagcagtaaagagaaaaggctgggtaactaatttcataacctattatcctttcctgctaaaatttaatattccttttatcagtcatcttctcattttacgtgttcaattgctttttcttcaacaaataaccaattagttatggactcttggactaacggatcagtatcatcagaatcattatcaagaaaatcatctgaatattcatttcatattgcagacacgtcttctccgctattggataacgccatccgtaatattgatttaatattatcaaatcaaaccaaagcattgtcatttattacttcacaatatcgaaattcaacatggtcagttcaaaatatgaaaaattcattacgtatattaaacaattcactgaaatccggtggcaaaattgttatttccggtatgggaaaatcgtataaaattgcaagtaagactgttgcaacactgaattcgttaagaatgcattctgctttgttacatccatcagaggctttacatggtgatcttgggatgattagagaagatcatggagattcattgatcataatatctgcatcaggaaattctccagaattattacaaatgcttgaacatacaccaataaccgtccctgttgtattgatgacttgtaataaaaattccatattatctaaacatccaaaagtgatgtcattgttattggctgaaataccatcaagtttgtctgagacaaatctttatggtttaagtgcacctactatttctactacattatgtttaacattacttgatgcagtatgtatttcattaagtgagttacatattaatgactatacaactagaaaagaggtgtttagagtatatcatcctggtggagccattggtattgattacaaacttgagcaaattaagagtgataaacaagaaaacaccattgaaaaagaagatttaaaagatattaaccataatgaaaaggatataattgatggatcatgtgttgatccgaacggcaagggtagtgtttctagtgcaacaactactaattcagatgatgattgtttcgatattgaggaactcatccttatgaaaaaagttaaagacacgaaatataaatctataattgacaagtttcctgaaaatgagtctgattttcacaaacttgttatcctcaatgactatattatcatccaagataaagaaaatagttcacttttagattgtgaattggtgcgtattgtaattcgagactgtgaatcgaatgaagacgactggtcagaagccatttggaaaataaaggcacttgcgcacccattcaatttagaagtgtgacaacttctatacttgatagaaacattttttttgtattaaaaaccctaaataacactttgtacttaattaaaacatgaactctactgacaatttccaaaaagagaatagtatttcccaaacgggtagctaaaggtgcgagttctggactttcctcatgttgaaactgaaaatataatttgaatatgacgacatccgtttacttgatatattttttcctttctgaacaacctctgcttacagttttttgtatataaaatatctatcagtaacgattaatatagtgaaccaatggcctcaatatttaaaaaggctaaagataggtcctcaagggacaagatgagaacaacttccggaacttccattcattcttataacccaaataaccctcttaatgcaccaactgaagtagcacaggcaactcagtctcatattgctagaaatgctaatgagttatcattcaagaagggtgatttttttcatatctttaacaataataacaatgtttctcttgatggtactatcgaaatatttgatcctatacataatactaaaggtagagctcctgctagttgttttaagatatttgaaaaaactcatagatctggggaagttggagacaaaagactatcaagtaataattcaactacaaattcattttctaattcttctatacaacagggaaatagacaaagtggtcaaagacaagtttctacttcttcatatagttcagaaaaggagaaagctttaggtaacctatttggtgtggttttatatgattttaatgctgaaagatcagatgaattatcggttgtagcgggtgatattatattcatatgtgcacatcatgattatgaatggtatattgctaaatttctgaataaagttggtgaagttggtttggttcctgtctcttatgttcaattaattgatgctgtaactagaattccttttaaggaatcgcctagattgataattgaaaatgaaaatttacctacagttgatgaatggaaagctgttaaaaataaacataaagcaagtagtagagttgttggtatacatagtaatgaccaatatacaaacaatgatcatggaacattatcaagaaatggatcagctcgctcagggggaatagcatcaaaaccatttggtaaaagacctataccagttcaaacaaatattgaatattttacaagtactccaaatacaaataagttttggttcctagtcaaggttattatgtcagacggtcatgtcaggtatttatgtagattctatgaagatttcttcaatttccatcagaaattattatcatcatggcctcgtgaaggaggtaagtttgatacaaaggaaaagagagaaagaattttaccatttattccaggtcccatcattgatgtcactgagagtttatgccataaaagaatggtcgatttaaatgaatacttaataatactacttcaattacctgattatatctctaaatcaagtttagtgctttccttctttgatttattggatggtgatgaaacagctgctaatccaaatgaacatgtctctgtgaaaccaaatagggctgcaccaaatttaaaaataataaatactgacaatagacaatctcaacaaaataagttcaactctatgagttccacaaactcaactacacaacagtatactgaaaatccgtcacagtccaattatgatagaagatcgcaatatgatatcagaaatagttcttattccaataaatttagtgactttggctagaaaaagttcttcagcttcaagtttaacacaaagttttcaacaaatgaacatacaacatcagcctataccagatgcaagagagcaacatgagccatccaataatgatcaattattatataatcaaaataagacaacaaaatcttctacatctctgtctgtatcttcaaaaccatcatctggatcaaaattcaaacttaaattctattatttagatgacatttttgcaatagtggttccatcagatacgacgttatctaatttgaaatcattaatcacaccaaagataaatgaagcggatattccaggaattgaatctaaaattcaaatttactctaaaaattctattaatacagattatcaaaattacaatgaatctgaatgtatcagatcagataccgacctttggaatgatgaaaatttcacagataagggtaaattcttgataatcgtataattttaatttgtataatgttagtttgtattgtattcaatttgtttaatagacatgttttactagtatattatttacataaatttagttgtacaaccagtcctctattctatacacattataattatttacagatttgtgttcaaaaaattgacatcattttttattcgatttgaatacagcttctctctttttagctttagcactgtatgctcttgtaacattttgaattggagtcgcatttacatctaactttacagttccatcttcattataaacgtcatggttaggatcgacgtctgcccttctatatacatttgttcctatgtccttgataaatttcatgtacaagtatattttatcagccattctatttattttattaatggaataccttaaatcccaatttgtttgggtatttttttctaagatatcaagcggtggtgttgggtatcctgatgcattttcaccgttgaataaatgttcagcttgaatttcataagcaaaaaatccattttctaaactatcttttaatatgtgtctgtttaatgcatagtacttacttttaaattcagatgcatatttggtaaaaaacttaatcttgtcacttggcttttgtggatgtttttcatcttgtaaagctattgtataagatgtgctacgtgttagtttctcatcagataataattgggattctttcagtgtatttgcttccaatgtattaacgacagcaactatactgtactgaatttcatccttatcatttgatttttcttcaattttttctgtttgttcaggtttttcatttacaacatcatcttgttcatgttgtatcattttgaatttctactttactatttttatcagtaacttcctcatctgtggtagtatcaacacgcacttttcttctaatatcagatgttttcattctcttgaacaaaattctaaatggtttacctttagtatccttaacaatattatctaaaagtttctgcatgagattcatggaaaattccaactctcgatcggccataaactgtggataatgcttctctttttgtttggaaatgatttccaaagtcatctacaatattgtgaagcaattcttgattcgagacactgacatcatcaacttgctctatttctttgctgttttttgtttctttcaaagatttagcatcattattgttacgatcaaaggtacgttcaaactttctctttttgaataaagaagctctatacctttgattatcgatattatgttctccaaagaaataattatcaatttgagatagcggtaaatattggaaacctaaaaattttttaatattatgaaatgccataaaaataccatccatattacccaatctagcttgtaaactgtatttgaacataacaattcttgcagcatcaaataattctctttcaaaactttcaaataaacctgtgtttttatttatttcataattagttggaaaataatcggtatgttcaatgtcaaatctaatggcacaaacagctctggttttaatatcaaaagtaccagttcctggtaatcttgtatcaatagcatcaagttgagatctaactaagaactttccaattctagcataatgatatgcagatttatcttcttgaaccggtgcagtacttgatttcaaatatttctcaaactcttttggtgttttggtgagcattaactctaaagcattacctagtactgaaagtgttatttcagtatcatttacacggtctgcatcaactgaaaaaacactcgcatcatcattctttggggtaacaattactgatgttggtaaatcggaagtcattgagaagttagtataatctggatatatttttgaaaatgatgtagtgttgattggtctatttttactcaataatttatgaaacttaattaaaacgcttgtcatagaggaagttgatgagtagtatgatatgtcttgataatgagaatttttgttttcaaatgttttgtttagtttattaacttctgatgcaatttttaacaatttattatctctggatgatggtgtaaagttactaatcttatccattttaaaatcatcgatatgtggtattgttgtaagggattgatcaaaattacaaaaacgtgttcttggatcgcataaaaaatgtgagccaggagagaatagcgtagattgtaaattatgcttgagctgaggcaccataaagggcttatcattgtactttgccaaagaaatgtatttaggtaagttgtgtttgttgataaagccatcgtccaattttgtaaattgttcaatatcttcgctttctgtggtttcgttactgacagatttcaatttattcttcaaacttttcaacacatggttatttgattcaagttgtgattcagccgctgtctttattccattcaagttatggaaatttttcaagtgttgaaagttcaccttagaaggatcaaaactttgatgcagcctcttatgtatacttaacatatatttaatgtgttttgacagtgaaatcaaatgcttttcttagtgtgcagctgaaattataggtaatattatattaatgtgttttttcataatcttgaaaaaaatgtttcatcattagatgaaaaatttcccaaaacggaaaagctatttttttgcagaactccccggatagaacgcgcattattagaattcctttaaaatactatgtacggctcaattgcattttagtactgtaaggttctgcaaattttatgagcacataatcacctttcaccgtttgaaaaacgttttgttagtatttcagttttaaaaattatttattgttagttttaagactgtttacgtaagttttctgatgataattagcagaatcggtgttgatcaaaaaagagtcttcagaaaaatgtactggataatcgaagtttttaatgatatatatatatatatatataaaaagtagggattaaagagtggtattctaatataaagtagctttataattttataatttatacttgatctatcttttcttccatggtttcctcaacaggttcctcaacaggttcctcaacaggttcctcaacaggttcctcaacaggttcctcaacaggttcctcaacaggtgtttcttcatttgatgtttcttcattcaattgatttgtatgttctacttcaatttcctcatctaattggttcacatcattatcatcatcatcctcttcgataattgcggaactgttttttgaaacgttagagatggtcgcagatacatcgtaatttgtttcaatctctttattttgagcagttttttcagcatcatttaaagtatctggtaaaatagtgaattcgttactgtcaagagtattttcacctttctcgttggttatgttatccgaaaaatcatgtatgctctttgaaacctcttctggaatttcttcggttatttctaatgtttgatctattggtttactcatatctaaacaccacatttctttactaacaaaagtcgatgtatttcccaacgtcacatcatttacttctacaactttcttgacttcacctggtaacttcctaccccttggaccccttgccctgcttcttcttacatcagcaactactagctccgcttttgtactttcacttgcttcgtgatcatttatctttttttcttccccatcatccacttttctaattccagttaatggattacctccaaacgccattccgggaagtgccataccaatcatgccattcaagttttgggcaaattgtgattggactctattgattttaggaacagttttttcaacctccttctcttcatcattttgtttcaagttaacttcgaaatgtctggttggtcttttgactggtagtttcggtttttgtttattttgcagtaatcccaagtctgccttttgttgttgctctagcatctcttgaaattgtgcaattcttgatgatggcttttttggtaccataggcggaggctttttattgattatctgttcagttacttctgttttcaaaatattgcttggtcttttgtttggtacttgaggtaactgttgttcagagtttatctttggtgttccagctagggggatatctaagttggctgttgtttctacttctttttcttgttttgtttttaaatcagagtccatattcatcctaccagtgttattatttccaagttgatctggaatctcctcattacttgaatcttttgattttggttcaagtttggattcaacaaaatttacaatatcatctaaactatccctttttggtgtgtcagtttcttgttgtggtccggtttcaatgaattcttccttttctgtaacttctctattttgggtgaattcttctttttcggttgatccctctttcaaattttctgcgtcatttgttggaaattgatctgtattattaatgaattcttgagattctaatgctacttctacttttgatttttgtgcatctttagtttcgatatccgtatcgtttgattcatatattttatcaaattcatctttctccataaatctttcagtttgggtttctttctctaaattattgatatcccctaaaatttcatctgcagtttcatcttcctgctcatttggttcaacaactaaatcaatttcatcaccgacgttttcgggttcctctttaacttgaatggatgttttttccttttgagtaggaaatttttctgtagatatatggtcatcgacaatttctttttcagtaagttcatgtggcttcaaatcatctctaaccacatctacatcttttatttcttcttcttcttcttcttcttcttcttcttcttcttcttcttcttcttcttcttcttcttcttcttcttcttcttcttcagatttagttgactcaactttttttgaaaatatttccgctgacttggatttaggtctgctggatgggacaactggcattggtttcctttcgttgcttagtgcttcatctagtgtagttactaccttgggtctagaagatggaatggaaggcggagtatctactatagattcacagcttttctttgcgggtctatgtgaaggaattgatggttgatttcctttagtgatttcattagtataaatttcaccagtaactactctctttggtcgagatgccggtattttgggagttaagtccgaattgttgataggtctagtgtctgatgattctgaattatcagatcttgaatgtggtctctatgaaagtacgaaatatgagattgtttgttagtattagcatttttacattcaattgattatcgtgatacttacagttgaaggaattcttggggaatccattgtggttgtttgtttacgataaagttcaacatgaagtgaatctggaaattaaggatcaatatcaaggagttccaaaaatcaaagcgaggagtgtctactaattaaatttaccgattagatttaaattattgttcaatgtgacagccatactaacaaacactaggtatacgtaatattatagtgagtttacattgtttgaaggctacagttcacaataaataatgataaatggaaatattagctaaaagaggtgtatttgaacagaattgcctaaaatatacaataatgatttttaataaatctgaactctatataaattgatttaagcatagtttaatctaaagatatcgtttaaaacgtaataagagccgttatctggcattaagtggaaaacttgggagtatctttgagggttttgttcatcatcaattaataattcaccagtgaccatgactaaaacatcaccagcttcagaagcaggttgtgcatctaaagtggaaattctgtgttgaaccttttggaatggtaaaggatgtaagtttttcaataatgtttcttgcaccttgcatttgagatgattcaaaggttaacattgagtgatctctctgtaaaaaaaatgataaataacaattagaaattgtcaattaatatgttagtatttcagtttcatatgctgaaattggtagaaaagtacgggcatctcagttcatattctactcttttgaagatacatacgtaaaggttacctaaagatgatctatcttgatcaaattgtttgtaataaaaatcacagaattgttgggataaggtattgaaatcgacagacattttctttaggttttttctttggtgaaattgagtaaattcaaattgatgcagaagctattcagtagatatcaaagatcatttatgcactgcaattttaattttaatgacatgaaggcatgcacaattctgcaggattctaaatctaaaaaatatttttacttcaaatttactatgtgcacgggtggacattctagcattttcgtcgcgtctagttaacaagttgacttcccaggtttaaaataaagaccaatgtttccttttatatacattatcacattatgcatgcatgtatgagagattgaccactttactggcatgtagaatagcatgtaaggattcacccttttttaaaaaatcaaaaaaaaaaaatatttttacctaaatattacaaagaaaataaataagaacgctaccaccataaatgtctaataaccttacctttgaaactgttatcaaccttctcttcatgtgtagcatagaattctgcttcgtgttcgtcaatttcagctaatccggaaaataaatcagcttcttcaggtttgataaatttggttctgaaagtaattttccaaaataagaaagtaccaactgcaatgaaaaacattaaataataatagaggaatgaattgatgtcaaatgtaggtataaaagcttgacaaccaagaaacatgataatcagccaagtagttaataatccaaatatagctggatagggttgtagttttgtagtccatgcttgtaatggcattgtgaatcgatcaacattttgtgatttacatgctctgtagaatcctaaataagtaatcatcatgaaaaagtagttaagaatttgaccaccagtacataagttaatcatccaatctaatgcaactgatgcggcgtcacctaattgaagtaatgataaacatgaccaaccaacagctaacgcaataccataaattggaacaccatttttcaaacagatactaaaacattttggagcaaaaccacgttttgataatgcgtataatgatctacttgaacaataaatataggaattacctgctgaaaatgatgcagtaatacataaaacattaacgatatctggtaatactgtaattcccatatttctcattgcaataacataaggtgaaacattggcacctgcagcaccttcggtaacagctttgactaaagttggatcattgtgttttaataaaataccaacagataaagcacctaagatataaaaaaacgcaagtctataaatgattgtcttaaaagctcttggcattgtctttcttggatctgcagcttcaccagctaccatacccaaatactctggcgcaacttcagtaaagactgctttcatatatgctgcccaaaatgcggaagctccactaccaaggtattgaggaaatgcattttcaacacctttaaagttatggaagccaaaagcccaatgctgtggattaccaccaaccatggtgataaatgtgaaaaacattaaaccaacagctaatattaattttccaattgataagaaaaattctgattcaccataccatttaacagcaaatatatttaaaactaaatagataacgatttgtggaacaaaagcctctgcagcattataatcagttctccaaaaatgaatcattgcattaacagatgtaatttcaaagggtatataaagggatatcataatgtaaaaattcattccacaacaaaactcaaaagcaggatcaacaaatcttcctgcatgtgtgataaatggagaatcaactggtaaataacaaatgagttcaccaatggttaaagtgacaacataaataataagaccttgaataaagaatgcaatcaaaagattaccacaaccaccattcatcaaaccataacctatagtaacaaataaaccggtaccaatagatccaccaattgctataagatcaatatgccttggtttaagtaaacgttgtgtaccttcacttttaaccaacgtaatggtagattcatcagattttgatgatgaggatagattatttaaactgcttttttctttatgtattactttactatctgaatcatatggaacaaaatctggtgtttgtgaatctctctgtgcattatcatcaaaatcagattgtgatttatgaacaatattttttttcttttgttgacggttaaaaaatttcattctcttgtgtaatattctatattcaaaaaatatcagcttgtttatatgaaaaatacaaaagaaactagtatgagaaatgttagtagaataatatattcctattcaacaaaaagttatgtgaacaagaaagcaaaattaacaggggaatgaaccggattaatggattaaaagcttgtacaaatcattttaatcaattcaggctgtacatttatcttaaatcgacatcacattgacttggtagattgtttgatccttttgttcgttgatttctgtttttctttctatattatagtgtacatactgattaatgacaacagctattgtttgtcacggtggaaggtgtggggtaaacatgattaatcaatctttaagaaagagggtccactgatcgttcgagctgtcaacttgatgaaaataataagaaaaatcattgcgggatatccctatattatgtcatattaaggcattaacatgtttaatgacgtaactgttttgttctttttctgctaaaacatctcggaattattttaagtaactgattttcggagttgtaaatattctcgcttttatcactttaatagtgggggttataatgaataaaataaataataatatacactaaagtaaatataagaatgttaaaattaaaatttgtgtaaaagaaaagagttgaaaagaaaactataaaatccaagatatcattctcgtccatctgctctccttctcatctttaccttgacgtttcttttcatagaactctaattcatgttgatcaatttcggctaatccggtaaataaatctgcttcctcaggtttgaccattttagttttgaaaaccaacttgtacacaacgaaaataccgatatcaacaaaaaccattaagtaagagtataagaatgaatcaacatcaaatgatggtgatggtaagaatgcttggcaaccaaggaacataatgattatgaatgttgttatcaaaccaaaaattgcaggatatggttgtaactttgtagtccatgcttgtaatggcattgtaaatctactgacattctgagctttacaagctctgtagaacgataagtatgtaatcatcatgaagaaatagttcatcacttgacaaccagtacataagttaatcatccagtctaatgcaacaccagcggagctacctagttgtaaaagtgataaacatgaccatgcaacagcaacaaagatacagaaaattggacaaccgttcttcaagcaataagtaaaaatcttaggagcttttttattcttagccaatgcatatagtgctctacttgagcagtaaatatatgaattaccagcagaaaatgtagaactaatacataaaacattaacaatgtgaggtaaaactttaatattcatgttttgcattgcaataacgtaaggagaaacatttgcaccagctgcaccttctgtaactgcttcaactaaagttggatcatcatgtcttaataaaataccaacggacatagcacctaaaacataaaaaatggataatctataaataatacctttaaatgctcttggcattgtctttcttggattttcagcttcaccggcagccattcctaaatattctggtgcaacttctgtaaagacagcctttaaataagctgcccaaaatgctgatgctccggaacctaaataatctgggaatgcattatgaacacccttaaaattatggaaaccaaatgcccaatgtagagggttaccaccaaccatagtaataaatgtaaaaaataataaaccaattgcaagtattaatttaccaattgctaagaaaaattctgcttcaccataaagattaacagcaaagatgtttaaaagaacataaataacgatttgaggaacaaatgcatcagcgggactatattcactcccatctctccaaaaatgaatcattgaattgacagatgtaatttcaaaggggatataaagcgaaaccataatatagaaattgtaaccacaaacaacttcaaatgcgggatcaacaaatctaccagcgtgagtaataaatggagaatcaactggtaaataacaaactaattcaccaatacttaaagtaacgggataaataacaaaaataccatgaatgaagaatgcaattaataaattaccacagccaccattcattaaggcaataccaatagtgacaaataatgcagtaccaattgaaccaccaatcgcaattaagtcgacatgtctttgttttaattttctttcagttttagcagttgcatcagctttaaatggattcataaatgaaaatttaccctttttaacatctttttcttcaatttcatcatctaaagaatctgattcaatatcataatgaactgatgtttcgaagtttttcttgtctgttaatgagtttccattagatgatgaatttacatgagtttcatctaatatttcaatgtttgaatcattgttttttgaatttgaaaaattaaacaaccccatcaatataatatgatttggtttgatgaaataaatgaattaaatggaactaacaatatataaatatttagattttatcaccttcattcaaacttccaaagagtggatcaaggagtatttataactgatttcaaaataaccattacgattaatcaaagtatttcaagaatggttaatattcggtgaaaatatacaaatatggacaatattatgttatcaatagtatcaatagataagaaaataaatttggtatatagttaacaatagaaattgttgataaaataatacaagccgaacacatcctattgtgaaaattcaatgttgataagctaccttatctctatgtttaacaaacacgaggaagcgatgctgatgtgatgtcattaactagcaaaataaactttgaaaaacaaaattgagagatacgaccctttatggacacgcactgataaggggtaattttactttttatgtgttttatcagggctgagggggatcggattatctcggatatatattgtccttaagtggatgtttaaacacgttttttagattgtctattattatactaaactataatagagtgttagaatagaagatagtaatacataataatagataaacaagttttgtggggcattagatatacgctgagttacacattataaaatccatgatattacacttgaccatcgggccctctgctttatcaccttttttcaatgctaatttttcataatatttcctctcgtgcacatcgatctccgctaaaccagtaaacaaatctgcctcttctggtttgataaatttagttttttagaccaacttgtaagtgaaaaagattgcaatatcaacggtataagaatgaatcaatatcaaaaattggaagaaaagcttgagctccgaaaaatgtaataacaaggaatgtagcacaaagacaaaatattgcagggtatggttgtaactttgtagtccatgcttgtaatggcattgtaaatatgctggcattttgagctttccatgctctgtaaaagcccaaataagtaatgcacataaagaagtagttcaacacttgacaaccagtacataagttaatcatccagtctaatgcaacaccagcggggcttcttgtggtagcagtaactaaagttaaatcgtcatgtttcaacaatacaccaacagaaattgagcctagcacaaagaaaattgacaatctgtaacaaatacttcacatctacttcacatctacttcactataccccccccccccccccctgcgatctacttcactacttcacaatttacaaactgttaatgtaagtgaataagtgataaaaaaaccgttgataaaagaaagaaaccacaaaattaccacaattacctttcagaagtactgtaccaatagtaaccaataatgcagtaccaattgaaccaccatttgcaattaaattaacacgtccttcttttaattttcttttggttttagcagctgcattaactttgaaaggattcatgaaagattggttttcttttatttgacgtttgaaacatttgtattattattaaaatcttcatcatctattgaggctgaatcaatttcagtaaccgctgaagttttaataaattagctttttctgagaataaaacattatttgatgaatagccaccattatcagtatcaaggaattcaattgtagattcatttttccaaggttttgaaaagttgaaaaattccatgatttgttaagaaagcctatttctttgattaagaggataacgggtttttatgctatccaagggtggtatatactacttttgtataaggctttattgatcaattacaaatcaaaattaataactatataaagattcaagttaacttgcccgtagataagatgtatacgataagaaaagataagaaaagataagaaaagataagaaaacacacaaggggacaatctgatatattatttgaataacaatagatttacctcatgcatagtaaattacaataaaaagttttgggttcttttgggaatacccgactgtatataacatatttttgtgatgtttaagattgattatacagattgacgtattgttatcaatttggaatcgatctgtgataagaggatattattgtctatttaggaaatgatagtgttaagaaaaatagaggggtcgacgttgcgtcgacagcagacttaaaggtgtaatagcaatgtgttggggttgctatgcatgttatgtagatgaagagtacatgtagtgtgtatagtatttctggtgttgtaaatacaggttcaaaccaatgaaactctattgaattgaaccggcttttttcaaagagttaaaaaatgcatattcacggttattgtatcaatattatcaaaataagatcattgggcaacaaagtacaaatactggtaaattaaacgatagtttaatgatgacacaagctgtgaggttcatgtgtataaaaagataatagaaagtgtaacattacaaaattggaggtactcaaatcattgatagttaacagagttagcatcagccacattgaataatttgctgaagatgcgaagttgattgcttaacttttggaattggaacatgcatctcactcacttttcagaactcagctctacacgtgatacttaagttgattacccccccaaccgttcttgtcagttcattcaaccaacagcgcattactcaattgaattatctatagacaaaccaacatcaacaatacaatgtcaactttagatactagtgctagaccgtcatttgcaggtggtacacgtttatcaaatatatcaacaagccaatcaaatactcaatcaacatcatcaacatttaatgggaaatcgaaacctaatattattacaccaaaaattcaagaaaatcatttaggtgaagcaattcaatatagaactcaaatactctctgattttagagatttaggtcaacctgatttagtacatttatcaaaatatgataaatcaataaaatctgaagttggtgaatatcattatgttacaggtatcaacacattaaatgttatacaaccttttatgtacttacaaactattcaattaaatgataaagaagttgcaactaataaacatatgaaagttggtacatattgctgttataatatatttagtaaaggtgatttaagaattagatgtcaatttcctggttctacatcaccaatgattcaatttataccatcaaataaaaataagattacaattaatttaagttcatcagatagttcagcagtaaattcatcaaataattcaacacacgatcttaatgaatctaatggtaatttatcaagtaataatagaagtcaaaatatatggattgaaacatacgtttcatcattaattcgttccatattatttccagatttaattgatagacaattaccaggtatgtgtaaatttaatccgattcaatcaaccaaggatgctaacgaagcaattaaattaatgtgctcaatgctattcagaggtgtcgaaactggttgtactgatatttataacagaccatcattgatcaataatcatttagttgatgcattgttaaaattactatcgattactaaatattataatattgcaataaaggaaattgaaaatttaatgactaaaaaattaatcaatttaaatgttttaattgttaaaattttaattctcaaaaatgattatgcaaaagcagttagattaatgcatgattgtcttattaaaataccaagagatggatggatgttaactgaacaaacaatatttttaattaatcaaaatagattagatttagcgcttatacctgcacaaattgcaattgaatgtttaccaagtgaatttttatgttggaaaaatttaattttaatttatattttgaagaaagattttaaaaatgcattattagcattaaattcatcaccaatgtatacaaataaaagaaaagatattttttctgcaattaaaccaaaatcatatgaattttcattcccattagagggtaaaatcgaaagtatttggaaagattgtgaatattttggttgtatatcaggtattggagatatagttgaatttacacctaatttagagattaataagattaatagttatagattaaaagtttatgaagagacaaaactcaattgtacatttaaggaagcatatgatctattagcattaatgacacaaaaatgtggttggggtgaattattgaaaattagaagtgaaatctttgttatggaagatgaatataatgaggtggttaagaatgagcagaatttagaaaatcaaaaaagtgatgttaatggaggtgataatgaagataataaaaatgatgaggatactaataatggtttggatatcaaacatattaaaaattcatctactatttcattaactgatatttctaataaatttaaatctaaaagattaagtgaaaaatggttagattcattatttttaatatactatgagaacttgaagaatgttttaatttatgaaaatgatattaagaataaacctaatattcaatatagtacaactgaatgggaattaatagcaaatgaatgttttaaagttcattattttaaagaagggttaattccatttcaaacatgtttaaataaaagatttagtatttttgcgtgttataaacttctcaattattaccttgattattctaaacatgaaaaactttttaaagaattgaatggaaaggaatcaaatgataagaatgctaatgatgaatacataaatgagattaagattaatacagatgaaattttgaaattatgttgtaaattaattagttggagtgcaagatattatggagaatttccgatattatgtttacaagtatttgatgaattgaagaatacaacagatttggatagtgttgtattaaagaataagattgaagttattttattagatttagaaactgaggaaaagaaaatacgtaaagaagctacaagttctgaaaaaacgctgtataaagatatggacattggacaaaatgttatgggattagtggatagatatatttcttggttagatcagtttacagatgatgaaatgtagtttaaaattgtatagaataaaataaattaaaatataaggtaaaacaagtaatactaatactaaagacaaccaaatagattacaaaacgtcgatgcgtcggagccatgaaaaattagctgttttcgtaggccctctcagagtcgagaagcgagaagagagagaatattattattatgatgatgatgatatttatactgttgaaattgaaatgtaattggaatgtaattggaaaattatgttgattggattaattttgtattttgcattttgcatttttgtaattttatatctattgtttcttattatcttactctataagtaactgttattgtcagtctttggtagaacagacataactgccccccttttgtttttattttaaatcacattgttgtttattggaagaatttaactctattggtgtccattaattaagtcaccatttttttttatttctaattataacaattaatatacatactacccatacatcacataaagatatcatctacatatctacatttgcattaatttgatcaattaaggttttattgtatcatttaaaatatatttcatctttactaatcataaatactattttctatttcaatcacaaactaaaaccctaattattttttaaattttattccctgtatattttgtctttaccaattgaaaaaaaaaaaagaaaccagaaaagaagaacctcttataatatctaataattaataataataatcaattatgtcaggattttggaaatttacaagtaattatgcctcaagagtcagcaaaattttagagagtaaaaatattgttttagaagatttattagatgaaagggaaactgtatctgaattattagcttctaatgcaaaattagttgaatatctcagacgacctgaaatactagaaaaattggtagattatgtcgttgaagatgatgaatatcaacgtaaagaaattgaaatggatttacaagctcgtgaagaattggaatttgatgaagaaaataaattaaataataataatgatactaataatgataatagtgatgatcatgatcagtctgaaaataataataataataatcaagaagatgatggtgataattttaaaaatgaaaagcaaaatgacatctcacagaatgacaatggtatcaataataaaactgaaaaagctgatactgattctgaaagttcaaatgaaaataaaaagacaaatcatcatgaagaaaatgagcaaaatgatgatgaggaggatgataatgatgatgatgacgaagacgatgatgaagatgacgacgaagatgatgatgaagacgatgatgatgatgatgatgatgatgacgacgatgatgctgaaaatgttgaagaaaccgaagtcgaaaaacacacaagaagagctcaggttgctgctgaaatattatccattgatgtttggtctataactgatgcatttatggaaaatattgaattattacaagaactttggtgtattcttgataaacctgctccattacctattttctctgctacatattttatgaaaattaatgaacatttgcttgatatgaaaactgatgaaatgattcaatttattcatcaagaatcaaatttagttgaaagatttatgagacatattgaaactcccccattaatggatttcttacttaaagtaatatcaactgataaaccagatgatttaactggtataattgatgttttaaaagatcaaggtttaattccttcattgataaattttctttcatcggatgttccatcatcaatacaaagtgctgctggtgatttcttaaaagctttcattacaatttccgctaataatgctgagaatacaactatcggaccaaatgaacttacaagacaattagtcagtgaaccaattgttagacttttagttgacaaaatgttacaaggtggtacaggtttatcaaatggtgttggtattgtaattgaaattatacgtaaaaataattcagattatgatccggtaccaattgtttatgttacagtcgaatcacatcctccaacaccaagagatccaatttatttaggtacattagttgaaatttttgctgaatcattaccaaaattcaatgaattattaaataaaaaagttgaaaaacaattaaatacaccatttggtacaattgaacctttaggatttgaaagattcaaaatttgtgaattggttgcagaattaattcattgttctaacatggcacttttaaatgatcaaaatggtgcagaattagttagagaaagagatgaaattcgtgaattattaattgaaaaacataaagagttaatgaattcatctgatgttaattcaaataattcacttgatgcatcagatgttttaaaagctgttgaaaatttaagattatcaaaacaaagtgaagaaacagatgaaaattcaaataaagaagaagttgaagatggtgaaaatgctactaatgatgaattgagtcagaaagaaaatgatggtgatgaagatgatgatgaactcatattaagaaagaaaccagttgttggagatcaattaaaaatttcattatatgataataaaatcatagttactatattggatatgtttttcaaatttccatggaataactttttacataatgttgtatttgatatagttcaacaaattttaaatgcaacaatggaaattggatataataaatatcttgcaattgatttatttgatagatgtcacataactcgtgcaattattgaaggacataaaaagtgtactgaatatgaagaagaatttggtttaagattaggatatatgggacatttatcattaattgcagaagaagtcgttaaattcatttcattagaaattcatcacaccacaccaaaatctagtaaaattgatgaaagtgttgaaaatgaggaatggaaagaatatgttgatgatatcttagcagatattagaaataaatataatgcagttttaggtagtgatggtaaacaaatgaatgaacatgatatgaatttattccaaaaagtctatggaactagtgaatatgcagatgatgacgatgaagatgatgatgatgttatcttagataataatgaaaacggttttatagatgctgaagctgatgacgatgaagatgaaaacaataataataaaaataataatgaaattgaatctgacaaattcacaagatatataggtgaagaaattacaggagatttacctgatagatttggatcatcagatgatgaatcagaagatgaaaatgatgttttgattggcaacaatagtaatcataacgataataataatattgataattataatgaaaataatgaaattataactgatgatattgaaggtattgttgattcacaaatgggtggacatccatatcatgaaatgtcagctggtgaattggatgatcaaacaattgatattgatgatgacatgtatgatgaagatgaagttgatataaatggtctagatgatgaagataatgaacgttataatggaaataatagttatgatgattatgatgattacgatgattatgaagatcctaatgatgatggtcaatcatataaaagaaatgatcatccattatatcaatcagatggttcattaagatcatcaagtagtgaacaaattttaggtattgatgacaacaattctgaatagataaaaattgagtttacaccatttcattcatgtattatctgtcaatgattaattcgtttttcaattttataaatttatgtacataatttatgacatcgtcggttttagttcagtttaatttattttagtttagtttagtttagttttagtttaatttagtttagtttaatgttttataattttatgttttatattcaattgttatactatgtagcttccggaaataataaaatacttattttaaaatttagctttctcttctataaatggctttgatacaattaattaatgataatatacagttttttttttatacgagagtaatctgattaacgagttttacttatagtgtcaccaacttccagtatcaaggaattgacaagttccaccaatttctcctttttatctattgcttttgatttttcaatttcagcatttttcaattgatttcgtagatcttttatagttgataattgttcagcttttgtaactccgacaccgggtaacgtatcaataatagttaatatttgacgagttttcaatattatatcagttgctagttcttgttgacttgattggaaatcaaattcagttggtggattacgatttggatcaatctcttttggatctgcagggtttaacggaacggtatcgtgattttgatcaacgtaagaaagtgcagagaacagtatatctatcagttgatccatgcatagttgtagttgtgtaagacggtccgtcattgtctttatatgaataatggtgttgagtttcttttatcttataatattgaagttcttcacagttacagattcatgttaataaatgaggtatcgtaatcggcgcgtcgattctgtaattttaactgaaacatgtaataagatttaaaaatttatagtttttattcagttttttcttgatttactgtttagacttattttcttcttcctttgtaacacctttattagtaaatttgaatggataatttatgacccagtagtattataacacctccatttatattcaatagtgatttaagggcccaattaatagcataaagaggtataatgttaaattaataatatattggaaaaaaattacgacattaattcttgttgtaactagttgatacttatagtaattattgtagaagcgagattcactactgatgaagtaatagattattaaaggaatctcagttttattcagttatatgagtagtatgggtaataatgtctgctgatttctgggtatctacacaaagatcacattggcaattcaccaaggaacaattatcaaatgcaagattatctatatcaacatgggaaaaacagaaattttcaaataatgcaataattgttcgatatgacacaaatgtaagaatttatattcatcaaatgattgcaaaattaggacgaagactttgtttaagacaaattattttggttacagcagaagtttatatctcaagatttttaacaaaagtttcattaattgaagttaatttttatatgttaataactactgcagtttatcttgcatgtaaaatatgtgagtgtccacaacatattagatcagttttatcagaggcacgtaattgttggcctgaatttatatcaattgattttactaaattagcagagtttgaattttatttaattgaagaattaaattgtttcttaattttacatcatccatatgattcattaatacaattggtaaaagtattaggaagtgaatcatcaattgaaaaatctttatcatcaaattctaaatatcgtttaaatttaactgataaagaaattggacattcatggcaaataattaatgatagttatatgacagatttaccattattatacccacctcatataattgcctattgcatcattacatttagtgttaatattacaattagatttaagtgatttagacaatacacagatttcaaaaacaaaaagcactagagctaatagtaatggaagcaatggaagtaatactagtgccaatatgaatatgaatacgaatacgaatatgaatatgaatttgaatttgaatttgaatttgaactccaatattacaaagaacaaccaacctttaatatcgggcttaaatatcaaactcccatcactctgatttcaacaaacaaactacaattaatgataataaggttaaagctacaaataaaaaaaacattagtggacaatatggactacgaaggaaattaagtcatacattgcgtcaaaggatgacaaatagtttgagtccagagaagtttgcctcaagtcaaatggaaaatagtagcaatagcaataataataccagtaatattgctaatggaattaataattcaagaattgaagcatttagtaactttttagcaggatctaatgttaatttaggacaagttatggaagcagtgcaatcattattatacctctatgaggaatggcaacattatgatgaagttgcagttcgtcaaagtatcaagacattggttatgacaatttccagtatcaccactaacatgtaatttgaacatgttgtaatagttatgtaatattacgtaaacaattatcaattacctgggttatttaaagaagtttttcaaaatcttacgttatacgagagaggcatgttttttttgctgattcgaaatcttgaaaatttgacttttcatgcattatattttgaagtaaagtcataatataaatttactttggaatactgtgttcatttcattagtcatacaggttatatcttacaaatactacgcgtctgctcataataaacatttatttattgattgatgcatttaatgagctgcgattctacctctttcgaaccattatcatcgagttccgatgaaacaagacagcgatctgcattagaggaaaggtgttgtctccgaaaccgtcgttaaagaaattaattccgaagaagacagcgttaaagaagaaactgaacatataaaaagttctaactctaatataaaatcaaaagctaaaagtgaaaaatctattgctaacttaagagcaattcaaaattctgaaaaacttgatatcaaaactattcaatttagtttacttttctacgtattattattcttaacatccaaatatatcaattcctcctttcaagtattttatcaattatcttataattatcctaatgatgataactcatacgatattggattaaatgatatctattttactatattttggataattaatttaatttttttgagaagtttcctcataatttatcttttcaaaccatgtgcaaaactattaggtattaagaagtttgttgcaactcaaagattcattgaacaaagttggtcaataatatattatgttctatcatgggggtttggattttatctttactataaatcagattattttttcaattgttataatatttatgcaaattggccacatgacaaactatcatctgaatttaaattctattatttagttcaaactgcaaattggtttcaacaatgcattgttatctttcttgaagcaagaagaaaagatcatattcaaatggtttctcaccatattataaccattttattatgtactggttcatatatttcatattttactagaattggtcacataattttacttataatggacattgttgacgttttcttatcaggtgctaaaatattgaagtattgcggttttcaaactatttgtgatgtaatgtttgttattttcatggtggtatggataatattaagacatgttgtttatgtttatgttctctggtttagttggattaaagctagagatataatggatatgaattgtgctaaattcttaccaggtcagtttgttaaagcttgttatacagattttcaaattgactttttattaattttattggctttcttacaaattataatgtgcatttggatgtatatgatcttaagggttgcaatacgtgtcattagtggtggtcccgctgatgatgtaagaagtgatagtgaagaatgatatttcattggtccacacatactctaataatcatctttactatcctatactttcgttaattaattactttatcattcgttacttaatattttagattttttttgtaaatcatttatagaatgtgcataatctcaaaaacaaatatacataatatatatatcaagataaaaaaaaaaatgtatgatcttattcaaaaattgaggagtataaacatataaccattgcaattaacccccaaataattaaaaatagtgaaatgtttttcagtgatttactcttaaaaattggattatctgattcctccagggaatacttatttaatctattgctaatttcatcatcatcactagctaataatttataaccataaaaaccaggtaagatgaaactaattaaaacaccaccagtagatccaacaatggctaagattaattcaaatgagtttaataagatcgcaaaggtataatttccaaacaataaaacaaaactaatggtatagaatgccaagttggataatgggacatcttcatcttccattttcactatataatcagcagaatcaaaacttgaactcagatgaggtaatagtggtgatctatcatcagtaccacttgatgttcttttcctttgataatccacccactttttagtcataacatgataaatgttgttgaaagatactcttgatggatgaaatattagaggaaatgataaaataaccatcaagatcaataatgcacgtccagtttgtgtaaatatatcattcttatacataagtaaaatattaccttctaatgcattaccgaatgtcaaatatccagatagtccaactgaaataaataatatagcagttattgtcattgaaatagttgtaatttttgcaattcttttcattgttggattacgaagttcaccaacaattgagaattgagttggacatgtgtatgctaaaacaattataccaaatgttttacaaacaggtttgaacccctgaggtttaatcaatgaaaaatcacccaatttatcttgaggaattgatttgtaatctgttgaaactgcaataatgaaattgcaataaattaaaaagcaaatatagacaattgatgtcaatgccacaattgatgtatatcttaaattatcaagtttctttgttaaacttagtggaacaactaaaactgtactaattaaaatatagaaaagactcatagacttcgtatcccatccatcaaatgtatagacaaggggtaaaatatcaccagttagtactaaatatgaaatattaacaccaaaacattgcagaaaaattgctaaatcaaataatactgataaatttggatatgtaattctacaaacagtaaagaaagtagctgatccacgtggaaggaacttggatgatgcaccttgtaaaaccattccaataccatttagaattcctgcaaataaaaggacgaaaacccctagcaaaataccatctgttctaattgcatacggaagaactaaaattccagaaccaattatagtattaacagtgttcaccactgacgataatgcagttgctccagtatattcaggcataatgatcaattggaatgaagagtgtcgatctacttatataagtaaggctttgttagaattattcaaagatcacaaaccacactcggcatgattagtaaaattactttaatgtcatgtaacacggcaaatcaagttctgactccgggcatgagtctttttttaattccaaaatcaaaagtttattgtcttcaggatatactcagctagatatcaacagaaactatgttgaataatactagattacaatcgaagagtagagcagtctcaaaagaaagaagaaaaagggcccttttttcatgtgacagatgtaagttacggaaatctaaatgtaatagaatacagaataatgatttgaaatacgataatataacgccatgtgcacaatgtgtaaaagctggggtatcatgtgtgacatcaatacccagaaagagaagattttatggatcagtaaagaatatatcattacattataaatgtcttttagctcttgtgacaggaattttccccaacaatgatatctataatatcgatgaactaatgagtttagggcatgaattaaagttggaaatgcctacccttgataattttgattatggagagaagggaacttttgcaaatcttaaaaaggaagctgaagaagaagctctagcagaggaagcagcggaagccgagacggaggcagaacttcgacatcaaaatgaacataataaaatcattattgaaaaaaacgttgaaaattcacaaaacgaaaaagttaatcagattgataaagaagaaactgttttgagtagtgaccaatctaattatactaaaaatgaagttaacgaagagaatgtaactatcaaaattaaaaaagagattgataatacttcaagtgattattccagtgatacttgcaaaactttaaaattgatgaaaaaactgaatttaaatagcagtgaaaaggaaaatgatactgaaatcaaagattctgacaaattaccagtcgaaacaaaaacaaatattaaattaccaccgaatgttaaaattcctgcaagcaatctggatcgtgaacgtttgattatggataggtttggtcatacccatttcattggtaactttggtacagcatctttattaaatggattgtgtgatattattatcaaaagatcgtataataaagtatctccaccaacgtctacacaagatatacgtgacagttcagttcaaacaattacttcagaaacgacgcctgtttaccaatatccgacacatttatacaatatggatgaaattaatgttgacagattcccattgattaatatcgttggaagagaagaggcagatgtttatgttagtgttttctttgaaaaggttcatccatattattttatttttaatgaagacagttttatggcaaaatacgaaatattttatgaagatttggatattgacattacaaaagacagtaagaatagaacacacacactttcaagattaagcagtgccgagatttgttcaatttacacagtttggatcttaggcagaagatttcagcaatattctaacccagaaaatcttccaacggatgctgtattagatgaggaaatgattggaaaatttatagatattattaaactttcattagctgatgtagtgttgactccttcaattgatggtattagattattaatcttattctcagtttatttatccagtatcaagattagagaaagtggttattgtttgatggaacttgcatcaattcaagctaaaagtttagggttgcatagaaaatcaattgttaacaaatttaatgatgaaaaatcagatgttatgaaacgtattttatggtcattgactaaatccgaaactacattatgttgttcatttggacgtgcaagtgcaattccatgggaagaaattgatattgacttcccggaaatcaatgatgtgaaagatgaacatttcaaaatcttctatctacaaagttgtaaattaactaaaattatctttgaaattttagattataagaaaaagaatcaaaaagatccattaagtctagcaagtgttgaaaaggcattatactttaaaaataagatgcaaaacttctggaacaatttacctgaaaaatggaaagattataagtctttaccaataaaacgttacaaacctaaattacacattcaatatcactattatcatatcacactcacattgccaatgtttttgtacattgtcaattcacataattatatcatcaaaaatgatgatccatttttatcattattggtatgtggtatacagtcttctttcaaaaccgcagaacttgtcagttttacagactctaaaggttttttcaatggtacaatttattatgacgtattctattgctacaatgctatcatggttttaacattaacatatattcttttcaaaacaaaggcagtaggtaaatgtaaagaaaagatcgatctgaagaatttaaatgaccaatatggtattaatcttgaagaaattttaaagtccattaatttaattagaaagttggttctaggtaacttgcataaaattgatggtacaatgaagagaatgtcagacattattgaaacattacttgctgatcttgggattattcaaactttagttgtgaaatataatgcaccaaagagtaatgttaaaaagattgaagatagacaagaaagtggtaatacaagtgttacaagtattccatctggttatagtcgtattaagttacgttataacaaatctgagaaaaggaagagatcacctgtttcaagttctacttcaagtaaaataaccaaagaagaaaatattgttacagataatactgaaactaaaaataaatcagtattgaaaacaactgatgatttgtcaattcataaaataaatgctgacccagaaaaaatatatccagcatcgaaacgttcaaagttaaatctaccaatgacggctagttcatctgatgatataatgaatttgatgaatttcaaaccaaatgcagcacagaataaactgatagatgaaatgaaaaatccattgattgatttggagtcaagcacaaatatattccaacaatattccgaaatgagcaattcttcgactaatatgttattcaataatacaccatcaattacaaatactccagtttatagtggagatggtatacatgttgaaaatgaacaatcaagcaattcttctgatattaatggagtgttaagttcattgagtttgaatactgatcttatggatgcattatttggtacagatatacttaatttagatatggatgccgatgaacatctttttatgtagaaatctatgtagtgaaagccaatacaacctatatcaggtataaaacaccatacatcctgtgtattatatagaataaatcataccataattgtaaatggcttcatataatgatgagaaataggaaacctgttcaggtaatagtaacccgataagagatgcgaatacgctatcttttactcgattaggaaattttgtgcatatttttttctgctgatagagaatggttactgatgatggatctctggatacaagttataataaaagcactttaccatccctgttatttcatttttctatgtactattggtgtataattatctgagaatattaaatacttcatttttactcaaataaagttaaacaatatctgcaaagaaatcacattaatcaataacctcagtctttttttttgttttgctaccaattttgatacctataaacaacatgcaatcagataacgataactactacaaattacttggtgcaggtactgcaataacaaccgtactttattttggaaaatacgcttatgataagtttaatgactcaaggaaattgaaagttagaagtagaagtaaaggatatggtacaagtgagaatgaaccagttcctaaacctacaccattaatgattacaccagagcaagttaaaactagagatgatagaccatggagacctttcagatggccataccatcaaaccatgtcaatatttaaattagacgttaacaattggcttgacatggataaatactattaccaatatattaaagaaaaagaaagagttatccatacctatggaccagataattttgattggttaccaggaagtgaagaagcttgtagggaattaatggatattgttaaagaacatatgatgttaaggtacccattattatttacaactattgataatggtgatcatgttacaaatgaattaactggtgaagttttagatttttccgaaccattaaaagatcatccattagtttatgtttctaaaatggcaaaggaagatttctatattgttttaaagggtgatgatggaattcatagattagttgcagctgcagttccatttcctggtggttcatttggtattaaatacaaattaggtaaaactttagatgttattcatagtgaagttccatattatacagaaaaattaaagccatcaatggaaaaatggtttggtagaatgaaaccagcagatttagttgaaagagcatcctggtatatttcatgggatcataaattattattgaacaatgtttatgcattaaaagaaggtgataaagttaatagcaatgttttaccaactgaatttaatgttagagttgaacgtcaaactttaagaagattaccaaaatcacaagcaattatttttactaatcatccaattttttattcaattgaagaaatgaaagatgaaccattggttccatcattaattagaaaaattatatatgaagcaccagaaggaatttgtaagtataaaaactttcaatcatttagagatcatattcttccatatcttaataaactggttgatagacaaattgaaaaagtacttataacagaggaaacacctgtgaaaacattaccaacatatccatttgcatatttcttgggtaattcaacctcagagaaaggctgggccaatcctacatacccaaataattacagtgctaaatttgaagaagaaattaagaatgcaacagagttggaaagagaaacttttagcagagctgctgaagttggtactgttgcattttgatgattactttattctttatactattacgttctgcttttcccatgtgtatttttttatttgaattttaagttctattttatttatgattgattatttagtaaaaagttatattatataattcaaaaactactataaattattttctttaacaatacaatgtcactgacatttttgataaattcatgttttggtaacgagggagttattttatagttatcaaaatttaaagaaacattacgattctttatcagattggaagttgatgtagttacgccaatcattgataagttaactataccttgattatcgagagatgaaattatctctaaaaattcagatcttttcagtaatgtgacatgatccaaatctttacatttttcaatataatattcgaaaaatgattttaatgagatgtcgttagcagaggaaatggttttgactgtatttgagtttgaatttgcagtagtttttgattttagttttaatttttgtaattcagcttcaattttttcttcatgtttgaaaaggaacgctaatatcatcttttgttgaattgttaaaggtttaagtttgaggtcaaagttagcattgaaagattgagaacaaactttaacaactgaagtaattgtcatttttggtattttttccaatggtgtaattgaagaatcaagtataatttttaaatcttcaatatcagttgatttgaaaagattttcttgaaataaatttaatgaactatacataatgtcaaaagctcttcttaaatcaccgttagttacagctgcctttttagaacaaaattgaattgcagcaggatgaacaattggtattgagttatttttaattgaagatggctgaagtgaaattaatttatttgaaatgactgattttatttgatctgctgtgtaaggtaagaaagaaactaatttcggatttatacaattagctcttaatcttggtaaaaaacgatcagtcaagtttaaagaattagcaatacctattaataaaatatttggtttattttcagtttgaataatatctgaagcccaagtaaataattcaaataatgattgttgagattttgttataatattatccatttcatctaatataagtatattcatatcacaattattttttgaatttagtgaataaattataaatattttgattatcaagttcacttctatatgataaacctgttatattttgataaatttctttaaataattcagttggagaattaattgacatacaattaaatttaataattctaacttttttatttaatttttcattatttaatgatcgtatgaaataaatattttgagattcatcaattaaatcagcatcattagttaattcatttaaagttgcattcatttgagctgatttaccagtacctggagcaccagaaacgtagatagaatttgattttattaaatttaaactttcaaaaatataatctttcagtattgaagcttccttttctctaccactaaggacaaattttgaaattgagtaaggatttgaacttcttaagaaaagatttttagctttagaatatggtgaattatcctttaaatctgaatatattattgatttttgattatatgaactatcttcagattttaatgattgtgtaagatttttacttacacttttcaatgttgaagttgttaaaatttgagattttgaaatcaaatgtttaggagttacaggtggagataataaacctaaatcattcgttactttcaatattgagctgttattatttaaatcagttttttgtcttttaatattataagattttttaggtgaattttccggactgtaaattaggttttcatcattttcattattaatgtaattatttgatcttttctttgttgaatgaattagagacattggttattgattaatgatattatgatagatagaatgagtgaaacaatgatgtgaaaagaaagagagatgaaaggggagtacacgaaaaacacgtaaaagatgaagtgaaatcaatgcaaagtggtttaattcaggattaattagtataaaatcaataaaatcaatttgaaacacgaaacctgaattaaaaaattgatatttacgcatcacttaaagtctctaccccttgaattggtggctggtatttcattataatgaatatttaattaattcccaaaagggaaggtgtcccaaaagggaaataaaagcgaaaataacaaaaaataaaataaaaaataaaaaaataaaaaataaaatagacgcgactaccttattatgtaaacaagtaagaaagaaaaaaatttccaagtggcaaactttcaaggaaatgaggaaatgaggaaatgaggaaatgaggaaattgaagattaaaataataataatactgaatttattattgaattattactacaacaatattaataaattattataccccattttcaatttctaaatttaattcaaaatttatgagccagttgttcgtactttcctttacagtttcccttcattttacactccaaatctgcttttcttcttaatatagattgttaattcatctactatctctttgagctatcgatagacatccattttagataggtttaaagtattttaaactacaatttatccccttaaaaattatattatatatcctcctaaattttatctttgtacattacaattttatgaaattcaattcatatacaacattcaatcataaatataatataatttaatataatatagaatggctcaagatcattataagtctggaggaggacgatattataaagatgaatcctccaaaagacatcaaaattattattcaaattctaataataataataataataacaataataataacaataattataattcttcatcttattcatcatataattcaaatttttcttctttaaaggggaaatctgataataaattaaataattcaaatcctttttcttctagaagagatgttgattataataataaatcaatgaatgaatcaaatcaatcacgtatatggcataataataatataaataatccaaattcaattaataataatattaataatattaatattaacaataattcatattcaaattcttatagaccttcctcaggatcatatcgtcgaccctcatcaatatcaaacaatttacattcttcatcttcatcttcttcatcaccatcttcttcaattcatcataatagaagattaaatttcaaatcaacgatataatgattatagctcttattcaaattcttatgataatagtaaatatcataataatatgaaaaattcaagaaataatggtttctataattctaatttctcaaatcattcaattgataatactcaaaatatttcatcaccagcaagatcatcatattcttcatcaaaattatcatatcatgaaaatatacattcttctcaatcattggattccaaacccaacaatgaattgaaattaaagaataatgataattcaaacgatgataaagataaagataaaggtaaagatgaagatgttaaaaataaagataatactgtacataataaagaaattgatgataatattgaaagaagagaaaaaaatgttgatcacaaagatgatgaaaatgatgaaattgatgaagatactgaatatgaaccttcattaagctttaatgtcaatgttaagtctgaagaaatacgatcagattctgaaattaaaccaaatactaatgaaatacttgtaaatatcttataatagctcaacatccaaagatgatcacgagaagaagtctattcaaaatttaaatgaaaacaatgataataatactaatgaaaatattgaaaagattaataagacagaacctgttgaagaaattaaaactgaaaagttagattccaataatgaggaaaatcttgaaaatagtaatgtaaataataataatagtaatgaagattcacagaataatgaaagttcacaaaatatagaagttgaggaatcaaatgatgacataaataaacctatcattgaaggatgtatttttccaatgaataaattagaatataaattatgggaattgaaaaatactccaaaatccatcagaaggaaaaatttgaagtatttaaatgagaaaaaacttgacagttcacatcaatataactttttctgcagattctttccttatatttaaacaagcagatgcctttgttttattcaatgctttcaaagaaattgaacataaggtaaagtataaaaaatcaaaattaactgatcaatatatctataataaacatttatgggaaaaagatgtctcattttatgataaacaattagagtcaatttatggatcaaataatgaaaaggagaaaactattaaacctcaagatgaaaaggttgaaaaacctaatccattacaaacaggtaaaacaactagaagaagtagacatcatggtgactctgttagaactgaagcggaatttttggaaatattagcatctttagaacaagaaagagagagagatcctttagtcagagctcaatatggtgctgcaatttatacctgatatgattatgaatccaattgaaaaatatgcaactctaagagttttagattccaataatttaattaaggataaaaatcaatgggcaagtagaatttcaactgataaaattgatacattttctgaagctgagcatgctagattttgtgaagtatatgctaattatcctaaaaattttggtcgtatatctaatgaattgggtactttaagaacatctgaagattgtgttttacattattatagaacaaagaagcaaactaattataaacaacttgttttaaataaaaataaaagattgaagaagaaaaatgtttctaagaagaagaaagaaataaagggtaaaggtgaaatttctactggtgaagattcaaatgttgatataaataatagtttcaataatacaagagaaggtgatgatttaacttttgatgatgaaggtgatgatactaagaataatgatgatgaaagtaacttaagtaaaagaaaaaccattggtattactgttccaccccatccagaaaaacttcatcatactgtagaggtagataaaaaaacttcaagtgtacaagaaaatattaatagggcaactgaaactccaactactgaagtacaaacaacggaaattcaaaaacccgaaactgagacaagtgaggttcaaacacctgttgaattgaaaagaaaggcagaatctccagaaactccgaataaacatattaaagttgataatgctggacattcaccatcatttgttcatcaagaaaaaagcatcgtaagttccgttgaagttatagaaaatgataataacacatccaatgccgaaccgatatcaaccgaaaaccttattgttccaatacctgagattattgttgcaaatgccgataaagatcttcatcaagaagaagctagtactaagaataataccaataatatttctaatcttaaaaatgcttctactatagctgctccaacatttacaactgaagatgatatggaaaaaagatttaaaaaatttaaaccaagaagtgatcatatttcaagttattggagtgtgcatgatattactaaattccctttgctattgaaagaatttggatcaaattggaatgatattgctgatgcaattggtacaaaatcggttactatggttaaaaattattatcaaagaggtttagttgatcatcctgaatggcaaacgattgttcaaatgaaaaagacacaaattgctaaacaaattcaaccaatacaacaacctacaggtcaattaaatacattaccacaagtaacaccatctagtcaacaaattatatcaccaactaatgatcaaaacatagctactcaatttgttccacaaatttcaagcttaaattcaaatccaccattacacaatggaccatcaatgggttattttttcaaacctgaaaatgcatattcagcaagtttcccaagagatcatgtttcgcctgtacttcaacatcgtgaagaacatttacctcacttagagaatattccacaatttgttccaataactcaaactacaccattatactcaagattcaattttaatgaatcaattcaacaacatcatataaatcagccgccaagttctaatcagccacatcaattaaacccagttaggaataagatgatgaatatgtcttcactattgaatgcaagtaataatgctccacctgtttcagcagttaggcctaatattcaattacctccattaagtatgtttggtagtggcaataatatctcgaatccaattccaccaccatcgagtactgttaatagtactggaccaagaataatgaatttgttgaataatgataatatcacatctgaacaatctacagtacccccattcaatccacaaccaaataatctattaaatgtttctacaacaatcaaacacgaacctcaacaagatcaaccacaacagcaacaacagtcaaatgctaactcacagtatcaaaatacaatgttttctggaggtacaagtgcgttagatgctcttgctcgtattgcgtttgaaaggaaataattttatgttaatataaatcatttttgtatatttaaatctcattagataattgtatattatagttgaattaaattatttatttattaaattatttatttaaaaaaaataacatatttgaatgaaattaaacaaacgatacatattgcttttatagaagatataaagcttcaaatataatagaattcagttaagcggctacagcttgaactacaattggttcacattctgtgaaacttgtaccagtgaatgccaattgtggtatgtttgtagaataattgtaaggatcactagtattcttacaagcaagccaaccactagtttcaccatcaattgctaaataactatcgtcaatagtgaaatcaccatttggaccaacaacagaaaattgaacaaatccatcaacttcactaaagaaaaatttataattttcttcaaaagtactgtagatttgattattacaatgattgtaagtataaacaggggaattttcacctgctaagaacaagtaatttatacctgcaccttcatgataatatgaaataccagttctagtaccattatttgatattgcaaataattcaattgcatgttcacatgaattatttgtggcatttgaacttgatgaaattgtaggtggtggtgttggtacaattgttgaagcagaagttgcaattgttgtaccaataaaagtaatgaattttgctaatgtggaaaatttcatgtttgctggttgaactacaatattacttttctgacatctttctaaattagtgtctgattcgtaggatatgtcctggtttatatagttttgtacatagttgtaaattgtatgccgatcagtgactggaacaatttctggcttcgtaaagattcaaagaaataaaaagctgaagatcgttgggccctgatttttggtagcagaaaaaacttgctttctatataaagaaacaaatttaaggtccagatttgagattccagaattattttcagtatgattcgtattttataatgcttttattcagttataaataacatatttagggatatacgtacaaatttcacatatttattactgttacattgatgatttttcttttttcttgattttgtgtatataatttattaattttaataaaggtcatcaatcaaccttatgcctcagaatcactatcgctatcataatcttccattgattcttgaataaatgtacaaacttcatcaaatctttcatctattataccatctaaaccttcaacatcagctctcaaaactctaccatatttctttctcggtctcttagaatttgcagaatctttatcaccccaacaactatgtttattacttgtaaaaactaatgagtttctgaaaaaccaatccactatagattcatcaattgttgaaataattgctcttaatgctgtagctttatcaacaaaatttatacttgctttaactaattttcttacatctctatgtccacataaatgaattataccattataagcttcaccaacaccaacaaatgcaattttttcaactttgaaaaatttaaggaaattatcccataaataaagcataatatcctgtgatgttgtaatattattatattttatatcatctttacctgaaactgttattggtatatttatatcaataacaccccatttttcctttaatgcccattcaataaaatttaatgatttatcaacagttactgcatttgcagaatctaaatcaccagtaattggatcacgtcttgcccaaatacgtgaaggatcatgaactattataactaatttatcattattataaatatcaggtgaacataaaattgttgattcatttattgatgttgaatttggtaatttttctgtaagtaaaggtaatgtactaaaattgaatttttcaaataaatctaatctttgtgaatctcttattgaatcattaattcttttatttttagctgcaacttcaataaatgttggatcgggtgatgatttaattaaattatcataattacccattatgtttggtaaattaaagtctaaacctaaatatccaggacttaaagatttccaatattttgattgaattttaataacatcatcaataacttcaattgattcagttttagggaattgaacttttaattcctctggaggttcaccaattaaaacttttgcaactcttaaagcggatttagcaattgaatctaaattataaccaccttctaaaacaacacataaattaccctttgctaaacttttcaacatatgtgtcatttgaccataacctgccggggaaacgtgacagcctccaataacgtcaccatcagctgcatcaaaacctgatgaaattataactaaatcaggttgaaattcattacatattggcataacaactttacgaaatgcataaatataatcagcatcaccaacaccaccaacaggccaaggtatattgacatttctaccttcacctagaccttcaccaacttgatctgcaccaccagcatttgtaccaggataatatttaccctgttcatatctatgtaatgaaatatataaaactcttggatcattaaagaaaactttttgagtaccattaccatgatgaatatcccaatctattataacaatttttctaacactttcaggataagattttaaaattgcagttgcagcaactgcaacatttgagaataaacaaaatccaccaggtgcttgaggttcagcatgatgacctggaggtctaacaactgctagagcatttttaacttttccttcaacaactgctttacaagcttcaattgcaccaccacatgataattttgcagataaaagagaatcgttattaaaataaacagaatcacccttttcagtttgttttaaaagttcttccttgttcatattatgagttgattcaataaattttaaatgttcttcagtatgaactgctaaaatttcttcctttgaagcttctctaattggtaattttaacatataatcaccaatttcatcagatcctgataatgttggatcagttattaaaccatgttcagctaaaattttataaattctataaattcttcttggatcttccgggatgtggatcaatatattcaaaatatgatgtataaattttagcatgatatctcattctaacatcgtaaactaaaccagttttcaataaaatatatgataaatcaggtttttgaggtgaaactattatatctgaatcttcatgtacaactaatttttcctttaatgtttcaacaatttgatttaatttatctttgttattacctattattattactgttattattattatcttcatctgaatctctcattgcaatatcaccatttgaatcttcagttttaattgaaactgatgttggagcagttaattgaccattttcaattatgatttcattttccagttcatcatgatttcttttcgtcgacacggggttttccatgaccatgattatttccctaaagagatggataggtaaagaacgaagtcaaagaaaaagatatactcaaaattcaaaagaagaaaactgttactgttaaactgtattatcatcgggaactccatcgcagcgatctgctcttataagagattcttctgtactgtaaataaaaattatttttatttttatttttcaaattttttcactgaagaattaattatttttcacttattaacttaacaagacaaagatgcaggtttatagagatgcacaacagtttttattaccatctcagaagaaaggttcgttacagagtagagtgtttgaaacatgtaaaaataataagaatattaaaaccaatccgaaacatttatttgcattagtttcatcaactttaaaatataaaccatttattttacatatactgaaaaagtcgaaaataatggaattagagaaaaaatctaagatacctgaaccaattttcatattgatggttcatgatttattattttctaaaacaaaacgtattcaaagtaaacaacatgcatggaaggatgcaataattaaaaatagaccaagacttgaagctgaattagctagattaaagattaaacatgcagttaaatcacttgatgaattaattgaagatgatgatacacctgttagatggtttagaaccaatttaattaaaactaatactgattcattattaagagaattttcacatttaaggaaagttaattcaattgatgaaattactaatacaggagttatttatcatgatgaatttataccaaatttatttggtattcatccaagggagaaattaacttcaactgatgcctataaacaaggtagagttattattcaagatagagcatcatgtttccctgcacaaattttaaatccaatacctggtaaggataaagtaattgatgcatgtgcagcacctggtaataaaacaactcatttagcatcattattaaataattctaagagatctattgttgcatttgagagagataataaacgtatagatacaattaaaatgatggttgaaaaagctggtggattagattgtataacaattcatcatgcagactttacgagtacaagaccacaagatttcaaagaaataacaggtatgttaggttgatccatcatgttcaggtagtggtatttttggacgtgcatttgatgaacaagattcaacaattgatgaagatgaagcaagggaaaaattaaatgaaagattagttaaattaagttcatttcaatgtacaattgttaaacatgcattaagtttcccaaatgtacgtaaagttgtttatagtacatgttcaattcatgatgaagaaaatgaaggtgttgtaaaggcaattaattgaagatgaagaagttaagaaacaaggttggaaagttagtaaacgagagaatgttttaccaacatggtcaagaagaggacatcctgaagttttcaaaggttatgaaaatgcaaaagaactagctgaaggatgtgttagatcattaccaaaagttgatggaggtattggattttttgcagtttgttttgaacgtaaattagatggtgatgattatgatgaatgatgatgatggagtaagaatggacaggtatagaagattaataaaaataaatagattgtttaataattttatagagtttaaatattatatattttattggaattaatacttaattaaaatctcttaataatatcatcaataacttcttgagttgatgaattaccacctaaatcaggagttttaattgtatctgccattaaattagcatcaacagctgcattaattttaacagctggatcagtataacccataaattctaacataagagcagttgatctaatagttgcaattggatttgcaatacctttaccttcaatatcaggagctgaaccatgacatggttcaccaataacaaaattatcaccaacattagcagatggaacaacacctaatgaaccaactaatgcagctgcaccatctgataaaatatcaccatataaatttggagcaacgacaacatcgaaaatttctggttctctaaacattctataaaccattgaatcaacaatttgttccttataatcaattatattatatttttctttattttcttcataaacttttttacaagtttctctaaataaaccatcagaaattgataaaacatttgatttatgaacaactgtaactgaaggttttgaatgtaaagatttagcacctaaatcagctgcttgttttctttgtaatgcaatttcataagcaattttagcaattcttttagttgcaacttctgaaattcttttaattgcttcagcaattttttgaccatctttttcataaattttttcttctttaatatataaatccttcagtattttctctaacgataaccatatcaactggtctaccaataccatcaacagatttaacaggtctaacatttgcataaagacccattttttttcttaatgcaacaattggagatgaataacctgcaactttaacagttggtgatgaaacagcaccgaataaagcaccatcacaattatttttcaattcagtaacagtttcatctggtaaagcagtaccagtttttttaaataattcaaaacctgcatctaaagttttaaatttaaaatttaaaccaaattcttttggtaaattttctaaaatttgtttaccagctggaataacttcacgaccgataccatcacctggaataagaccgatagtaagagttttagttgcagtagtataagatctagctaatctaagcattatttgatagttattgaaggaaagagaataataaaaagagaatatgtcaatgtcaaataatgaattaaaacaattaattaataataattaatgctgaaaagtgaaaaattacctaaaattcaacgtgaaatcatcataataattagtaagagtcattttattataagagaaaatgcgcgttgcctgattaggaaatatcagaattaacctatttggtgattatataatcattataataatcattaagtatcagggtgtataaacaagtagaatatatagaataaatagaatatatattggtcgttaagttaataatgagaacaagaaagaataagtgacattaaataagtaaaagataaaaggaaagaaaaagacaacaaagaatgatttgataacataacatagcaggcataagaataaataatattgactattataaaattaaatcttttctttcccaaccttgagctttatgattttctaaagtatttgaaggttgaggtcttggatcagatttaatttgtaaagcgaaaggatttctatcattcaccatttaattgtaaatttgcaattgtatgattaacttctctatgttttgcttcatcagctctaatatattgaattaaatcataaaattttgcattttcaggtaatttccaataatcaattgcaatttttggtacaattgcatcctctaattcagggcataaacctaattctatatcttttaaacatcttgaataagtattaacagcttcctcttctaaataaccaacaaatctatgagcagttttaggtgaaaataaataagttaaaaagaataaatttgcgaaaacaccttgaccaacccaaagtaaagctcttgtaaattttgttggttttgccattttaaggaatgttaataaatgcattctttcattaaaagcttcatctaataaagtatcaataaaagctttatcccttctaaataatctaattgcatgtaaatgtcttaagaaagcagcaactgcaccgggaatacctgcaatactttcaagaacaacaaatctagttaaccatttctccaaagtcattctattttcactatttgcaattttaattctatgattttcatcaattggttcaatataaccagtgaaataatcaaatgatttacgtaaatatttcataaaattataagttataaaatctcttggagatttaacaggtctatgttcaaatttaattgcatgcatttgatcaatatcataaccatgatgtttgaaaactgattcagttaaaaattcaccttctctttgttcctctaatgttgtaagtctaactaaatgagtattatttgaaggtggtaaatgattaagatctaataattgttgttgttgatgattagatgtgggagttggagttgttgttaaagatcttgatattgatcttgataatatattagatacaatatttgaagaggatttaagtgataattttattgcatttctagcaatatgacgatgaggtgtataagtatagatcattgtttattatttaagagaagaaaaggaaaagaaaaagaaaaagaaaaaggggaatattgggagcaaaagcaaaagcaaagtgaaaataaaacacacaccagaaaggatggatatagttggtgaaataaaaggttaggaataagaagggatatttataatagaaataaatgagcaaatttagaagtaagagtatgaatatgaatatgaataaaggagagcaaataacaagttaaaggtaaattatgaaaatatagaaatttaatcatgtatgtaatcatgtaaaaaaatgaatatcgtagaaatacggacggaacaacgcagaatacaataaaaataccaataaagttgaaactccgtactcattattataataacaatcaacaaaagaaatgatagcagaaataaaaagagagatggaaatagaaatagaaacctatataataaagtcaatgaccgtttcccgttaaaatgacaggtcaatctccggagcattacgtaatcttgcgggcttttccctcctttttccattttcctttttctattacgtattttcccgttatttggtcatttactgtcttattaattgtcattagaaggtcatcacatcacataacatatcagatgtatggtacattaattgatacaatatgtgtgacaatagtgggattattgataattttaattattttatataaaattattaatattgaaaaatttaatgtagataggaaaggtttaatatggattcgtaaatcacctaatcatgtattacgtccaatacgacaatcaaattttaaaattattgaacctttaccaagtgtacttgagagaagtatagaacatagaattaagtattaattagtatattaattatataatattattataattataattataattataattatgtatcatttatatattataagacaaataaagaagggaaaaaaagggggtatactatactatattacatattctaactatccacgtagtaattcacgtaataaacacataaatgatcttgatcttgaacttttagtgattttaccttccatattactattaatatcactatcatcatcatcaatataaacaaatgaatcaattgtgtaaagtgaacaattatcagttaaattattaatattaccttgtttatcaataattgtttcctttaaattatttgtaacccatttaccatcaactaaaaatttataaattaatggtaatttatttgttttaattgatataacaaatttatcaattttatttaaatattccatttgatgaatttttgtccattcatcaaaatctcctgctaaataaacttcgtttgctttatatggcctataaattatattatatgttagtatttatatttagattatttatagttatttttttactatactaatactaatacagatacataccaagttattgtaacagtgtacattgtccttcctatatgaatattatattattctaatgagataagacagacattatgataatacctgatagcagagccgccaatgaagatttatttttcagcgaaatttcactctctctcagtgatgaagttgccataaagagaagagctcctgctgttagtgatgatagtagtgtgttatgattatgagagtgtgtatgtgtatggttatgactgtgactgtaattattactctcattagttaaaagatttgatgataatgatccaattaaaacacctgatgatgctaataatgtgaaaaatattgatttaaatttcccattacctgattgtacccttaatgcataatctccaactgaatgtggtatagaatgtaataatgttgcaattgcagttgatactccaactgaatgtgatgttgcaaatgctcctgataatgctaatccatcagttacattatgtgcaaaatctgaaattaatgctaaattattatgatgtgaatgtcctttatgattatgttcaccatgatcatggttatgattatgattatgattatgtccttcaccacttattatggaaaagatcaaaaatccaattaatataattaatccttgattataattattttcaccattattattactattttcaaaacattcaggtaacatatgtaaaaatacatctcctaataatgcaccaactgcaaatgatgcagctggtttcattataattggacttgctaattttggtattataattaataaaaataatgcaattgaaggtccaataattgaataaattgcacctaataatgcattctctgatgatgttaatgggaatgcactaattgaaataaattgaattatatcacttaaatcaaatacattatatgataatctattaactgcaaatacttgatccattttctgttactttatagagaatataatataagcttaagctattagaaaaagacttgagtgcatgtccaaaaaccattagaaactgacacagaataaatttaacagtctcaaagtctctcataatagtaattttcaaatttataccctatttcttacttcttatttctttttatctacttttatctacttttatattattattttatcactgattatacactcaaataatgcctgcccttgcaactcatacggaggatgggcggattatgttgaagatttctttaaatcaaaattcaaatttagattcaaattcagatttaaattcaaattcaaatataccaccaacttcacctgatttatctgatatttcattatctgatattgaaaatgctgtaattacaactgaaaaattatcaaatcgaatatcaaaaattaaaactaataaatcatttattatttcaatgaagttaccaaaggataaactgatgaaaagtttaactccaataaatttacctccaattttccaacctcaagaactgcaatctcatataactccatcaaataaacctccatcaaataaacctccacaattacaacctcatttattaccaactttacaatctctcttacctccaactttccaacctcgacctgatacaaattcatctgttgagacacaacttcaatcacatattcaacctcaacctcaaccccaacctgaagcttcaacctgaagcagctcaggctcaggatcagccacaggcacaacttttaccatcaccaacatttcaacctaaatctcaaccagaatcccaaccatcagataaatctcaacaaacaaatgaatcacaaccacctttaccaccaccagtacgagctccaacacctccaacttctcaaccttctttcttagaaactactccaaagggtaaaaagaaacgacctaaaccattatattcaagattaatgattagatacaatgtaccatttataaatcctactaataatgcagaagaagataatgatgatgaagatcttatagaaaaatattttaaactatcattaaaggatccattaactggttcaagaattcaaatacctattagatcaagattttgttcacatgctgaatgttttgattatattacatttctttcattatataatttaagaccatttcgaatacatttaagaagacaaatatcaaatttacctcctggtccattaggtgtttcaagtgataatatcaaaccagttgttttatcagttttaaatgatacaaagagaccatttttagaagctaaaaagcataattttaatacatcatcatttgaatataaaaataaaatgaaaaattttaaatattatcataaaccattaaatgatctagaatggttttgttgtccaatttgtaatttagaatttaatattaaaaaattaggtgatatttatgttgttggtgaattaattgatttattattagatgttaatgatttatcatttaatattttacaaattgatttatcaaatggtgaaactaaatggattaatgatgatgaagaggaagcaaagcctataaaggaaaccgaaattcaaactatagatttagatgatgaagatgaagattatgatgataatattattaatactaataataacacgaatgcaaatacaaatattaatatgacaattccaaaatcaattataatacccacagatagttcaactcctacaactggagttgatgaagaagctcaaatgttagaagaaatagatgcattatttgatgaattaccaccatcaccagattctcaatcaccaattagacagaatcaaatacccacaacattaccaatttctaaacatattcaaccttatccaccaaatgttcctgttttcatgccaatttccaattattcaggggtagttgcatttcgtccaacacctttcacgccagatactcaacaacagaaccatgtattcatgagtggagagggtgtaccggatgatcccatagtgttagattagcagacttaaaagtatgtaagattaatgtagtacgtaatataattaaaataggtaagcgacttttttataatcttcaaatcagcaatcaccctccatcaccccaggtcttcatcttcatcatctcgtgtttttatatagtatatcatacaggatataggataataaagcatagtttcatatactctaatagatggatagagatatttacccgcctggaactcaattaactgttggttcacatttaatttcaattattaaatattttagtaagggtggctttgcacaagtttatacatgttcaataacaccaaaatggaataataaatcgattgtttgcttaaagagggttaaagtacctgataaaccttcattaaatattttacgtaaagaagttgatgcaatgagaaaattacaaggtcatgattgtattgtttcatatattgattctcatgcaactagatcaaataatggtataggaccaggttatgaagttttcatgttaatggaatattgttcaaataaaggtttaattgattttatgaatacaagattagttaataaattaaatgaaaatgaaattttaaatataatggaacaaattactcatgcagttgcatttatgcattcattaaatcctccattaattcatagagatattaaaattgaaaatgttttaattgatgaaaattttaaatttaaattatgtgattttggttcatgtttcaacaattataaatccacctaaaaatattgaagaatttaaatcaattcaagatgatataatgcaaaatacaacacctcaatatagatgtcctgaaatgttagatttatatagtggtaaaaaaattgatgaaaaatcagatatttgggcattaggtgttttcctttataaattatgtttttatacaacaccatttgaatcaaattcaattaatggtaattttaatggtgattatgcaattatgaaaggaatttataaaattccaaatataccaatttatagtgaaaagattgaaaaatgttataatgaaattgttaatggttgatccaaatttaagaccaaatgttttccaattattagatgaaatacgtaaaatgagaggtaaaaatccaattcatatggaagttaaggtaccaccaaagactaattatttaacagttccaatgcaagcaacaacaaattaataacttcagttacaggctttaataatatggtttcatcagtcatcatcatctaaatcatcccaattaaatccatcgggaaattcaaatacaagtttattcaaatataatgaactgaaaaaagtcaattacgaatacaatagaggataaaattccaaatgatcaaaatacaattcattcattatcaccgactaaattaagaaataaaaataggaccattatcagtatatgaaaagaaaactgatgatattaataatataacaagttcgatggattttatcaaggcaatatcgagagagaatacatcatcaggtaattcaagacaaacttcaagatcaaagaaacgttcaagtattacatcacttaaaaatcttttaacaggtggatctatgaaaggtagtagtagtagtaattataattataacaataataactggtagtagcagtagtagtagtagtagtggaagcaatgaaagttatagtaagagaagtattagtaatgaattacttaataatacattgggtgatttacaggagatgtcaccagaaactaagaaaccacaaagttttgaaattaaataaactaccaaaacctatttcaattgaaattataccaactattaaacgtacaaattctattcagaatagagttaaaacattatttagaaatacttcaccaccaacaattaaaacagctcaaggttatggtaaatataatgaggaacaattaaaaaagtcaatttcaactaaaaagccattaccagcctccgaaacctaaaaagccagatcatttgaaaactttagataataatgaacttagaaaattttgaacttaaatatcctggaactgtttaattttatttctataaaaattattaatacatttatttatttgttatttattatttgacttcatctatctacttaattagtatggtttaaaccttttactagatttagttgatgatttactctttttcaatgatttcttaagtcttttacgttcttctttagtctttctttttcttatccttttcagatgtagtttcttcatcattattagtatcattatcattaatatcatgaaatgtaaaattatcttgtgtattttgtaatccttccattgcccaagcacatattttactatcttcaccagcggtaaatactgtattatttataatacttatatcacgtacaatatcatcaccatgaccaccttgtaaattccaacatttagaaggattgaaattttcattttgggcatcaaattcaaataatttaacaatattttcagaatttgaaccacatgcaacataacctggtgcatatagatcaattacgtattcacaattccatttttctctaatatcaccaaaatctttatcaccacgtttgttattttgaatattgttattattaatttcaggatctaaatcattttctgtacttaaatcgaaaataccaaaagtttccatatgtgataaaacataaattctatttgatgataaaaaattagctgaatgaacactagcaaaattaatacattgtaattgagcatcatcctcaatttctatattagtatcataaatattaacataattatcagttgcaccggataataaaatatttttccttaaaggatgaaatttaacatcagttatatcatcattatgagaatcaataaatgatcttaaaggtttatctaatttacgttcatcccaaagaattaattctgaatctgtaccctttaattgactacctgatgcaattagtccatgatttacatcaagactataaaatggtaaattacgtgaattattcaaaatgtgaattggtttaaattcaattcttgaatcccataatttaactgttgaatcttctgaacatgaaattaaaatatttgaattatttggatttgattttaatttatgaattggaccattatgtgcattaaatgatgaaattgatgaccatttcaatggatctgttgataatgaatgaatttgtccattagatgatgaagcatatatggaagatgtatttgttgaacataatgataatatccagtcaggtaatgttattgattgcattgttcatatacaaaagaaggaaggtaaataatatttatttagtaagaaaaaaaaatttggtgttttttcatgtaacctccataaatctgtttctgattgtttttattaatttaattgctttctttcttctcatatttccgtaagacgatgtcaagtattaataaatcaggtaagagattcactcctaaactcacccaaagaggtaggaaaggattagttacaccacaatcttcacaagtaaccactacaagtcaaagggatatttcaccaacaagagtagtttcaccatcaccaccaatatcaccagtttcacaaaaaactgtagctactccaacaacaacaacaacaacaacaacaacaacaacacctgctttgagaacggcatcattatcatcaagcataccaataactaataatactaataaaataagaactgcatcattatcaacaaataatactaatacatcaacaacatcattacgtcgtccaagttatcaatttactgcacctacaccaaattcaagaactggaggtaggaaaagattaaattcattatcatctaatactatgcctagaagagcatcattatcactagttgcaagaagagagagtcaaagtctaggacaagggcaaggacaagtacaaggacaattacaagatcaaataccaatacagacacaacaggaaattaagaaaatacctattgtttctaaaaaagtaaatgtaccaattattatcaaacaaagggaaaaagaggaaagtaaagttaaaatacctattaaagatactgagatagatccacttgttaaacctgatattgaaccaaaagaagtggtagatgaggtagaaaatgttgttgaaaccgtacctgagccaacacagcctattgaagcatttataaccgaagctgaattagccaaaaattctaaatgggttttaaatagggagactagaaggtatgaattagttaaaattgaagatattaaggataatacaagtgcagctgagagatatgagattgggcataaattagagaatatacttgaaattcaaaagattttcaaagatagtgattcaacacttacaagtagtattgaaattaatgagaataagatgacaatgagagatttatgtaaaccatcattcccaattgggaaaacttctaaaaattttgaagctgcaattgcaggagaacggaaattagcagaggaaagaattaatagaagaaagatacgtgagagggctaaaaggttgagaatgagtgaagataaagttattagagttttcggagatgaaggatttgaagagatgaatgaaaaggagagattagccaaagttaaagagatgatggataaaaaggaagaagttgagaaacataatgttgttcaattacaaattagtgatggtaaattaacatataatcaagagagtacagttgttgatagacatattggtaggaatgaacaaaataaggaagttgttgaagaaaatctatttgaacatatagttacaagtgagacatatacaaagagaaaagttacgagtaaatggagtccacatgaagttgcagaattatttaaagcggttagtatatttggtacagattttgaaatgattgctaaattattcccatataggacaaggaaacaaattaaggctaaatttttattagaagagaagaagaggccacatttagttgaatttgcattattaaggaaattaccagttaattttgaagaatttagtggtaaaagtggatttaaatttaatgaattaagtgaatatgagaaagagattgagaatttaagggagaaacataatgaagaattaaaattaatggaaattgaaagggttaaagcacaaattgaggatagtggagttaataaagttaaaaagagtcgtaagactatattagcagaatttagaaagaatgaagaagttgttggtacaattgattaattgatgttataaagtgtataataaagtgtatttaaagatataaaataaagatccagtaagatcagtgaaaaatttaaaataatatttcgcatattaatttatatccatgtcttttactataggggtataggataggatagtatagtatagtatagtatagtatagtatataatgttagagattgataaatctagtgatgataagtatgttaagtttacagtacgaaagaaggtaaataattggaaatattttaagataattataatgataatgatgttaatgggtaataatatgattatatcggatattattagtgagtatattgaacattatactgatattaatattaaaatggtaattaatataatcattatagggatgattataagagaaattatcaatagggatacaattaaagaggaaaaactattaattatcccaacattaggtattcaaattgaagatattagaggtaataagaaatttataccaagggagaatatcaaggatattgtgattaatgaaggatttaaaggtaataaagttatttattatatgtgtgttatcaatagggataataataacaataataataataataataatattgaagttgtattccccaatatattaccaagtataagtatattagaggaagtgtatagagatacaaggaaatacatatcagatatcatatgatgatacgtaatgaccgaaagaggtaataatcaatcatatagtaaataaataataataataataataatattagcaaatgaaacaaaagcagtgcgaaaaatggaatttgtaagagaaattctcaaatggaaaaatttgctataaaaccactcgcttttcccacttttttcattgtttactattttactgtgtgttatggatgtattttgtatgctcttttgattttactctcttttgaatcttatcttttagcatagctttatttaaataaatcaaaactacactcccactttagtcattcctttaattattatttttaatttaattaaataaaagcaaattctacttattattactatcattatgttattttcatccgttgttaattcactcattattgcactttgtgcttcaaatcaagtaaatgcttcacctgttgcacatttacatcatatgcataaaagagatgttgttcatgttactgaaactgttgttgttactgttggtggtgataatactgctttagctcaagctcctgctgcaactcaagcaactttagatactcaaactgaaggtactcaaactgcttatgcttatactgttacatctgctacagatgctcctactactacttcagcagcagaaactacatcagcagcaactacatcagcaccagcaacagaagatgtcacatcatcagcaggtactaagggtattacctactcaccatacaattctgacggtacttgtaaaaatttagcgcaagttaaggaagatttcgcgaaaatttccgattatggccttattagattatatggtgttgattgtaatcaagttgagaatgttatgcaagctaagggttcaaatcaaaaattattcttaggtatcttctttatggatcaaattagtcaaggtattgaacaattatcaaatgctgttaaaacttatggttcttgggatgatgtttataccgtttcaattggtaatgaattagttaattctggtgaagcttcagttgaacaaattgcttcatatgtttcaactggtaaatcattattatcttcaaatggttatagtggtcctgttgtctcagttgatactcatgttgctatcttaaataatcctgcattatgtgaatattctgattatattgcatttaatgctcatgcttattgggatggtacaattgttggttcagatgcaggtccttggttattattacaaatgcaaagagttgcaaatgcttgtaataaacatgttatgtgtgttgaatctggttggcctcatgccggtgatgcaaatggtgttgctgttgcttcaaaatctgaacaatcaaatgcaattaattcaatttcttcaacttgtggtgatgatactatcgctttcaccgcttttgatgatatgtggaaaaatcctggttcaaaaaatgttgaacaattctggggtttattctaaattaattaaaaataaaacattattatattataacaatattatattttaacattatttcgttcttttttcaaataaataaattatattaccactttatcttatatcatctcatcttatcttatttctatattatcttatataactaatcaaacatcttcgtttgattatcttctccgtgattccctttggtaatattatattttatatctttcaaataaatacttaaatatctaattattagtaatatcatagtatacaaagcgacatttcaaaaaaattcaaaaattatttttcacttagcctttatatactccacttgaatcatcttaaacccaataacatacactacacatacacatacacatataatgaactcattaagattatttatacgttcatattcaacttccaatcttaacaaggcagaattacatatttatgaaaaattgaaaaatcatttatctccaacttctttagaggtaagggatatttcaggtggttgtggttcaatgtattcaattaatattataagtgaaaaatttaataatatttcaatgattaaacaacatagattagttaattcaattttaaaggatgaaattaaaacttggcatggtttacaattaaaaacaaaagcttctaataaagtataaacaatattatattatattatatgtatataaatcttataaaaattactaaattattcaatttattcaataacttcttcattctcttcaattataacttctttaatagttttaactttctctaattcaatttctttccttttaataataaatttatcaagtttttcaattgttttagatctataagatttccaatcatttaataatttctttctttgtaaaattaattcccttaatgcagcatttgtatccattgtatcactctcttcaaattgtgcagcatattcttttaagtttttacgaactctctttttatcattatttgttaataatttaattggtcttggtctccataaaaattctttaaatgaattaatatgttcctcctttaaaatatgtccaacacaatcataaattgtataaccattattaattttagttttccaaaatgatgaaattgctgtaacaaatctacctgatgattcccattgaatatctgttaaacctgcaaattcattagttttcaataattttaaattagatgaaactttcttattttgttcctttgatttttcaccatcaaattcaacatcataaaattttaatttacttaaattttcatttaatgatgttaaaattacaaatctaccatttggtgaccaaattatatcatttaatgaatctgaaaaatttgttaatggaacccatttctttaatgatgaattattattaactttaacttcttcaatatcgaaaattgtaattgtattaatactacttgaagttgcaatatttgattgattattaatttcacctttatcaattttactaattgtaataaatttatttgattttggttcccatttaaaatttaaaattaaatcagttaattcaattttatcaactggtaaatctttttcagttaatttaaaaatttgtaaatttgaaaagaaagattttttggattttgtatgtcttgtaacattacaacataaatatttacctgattcattccaatttaatttaatatctttaacttgaactaatggaattgttcttaaaattgtctttgaaggaatattcataacactaacttttgcactttgattttcactttctggtgtccaatatgataaaataatatctaatggatcatctttctttgaatttgctaatttaatacctgatggtgcaaattcaaaatcaacaattccatcaattttaactaattttttatctaataattggaaatctttttcagtttcataaataccaattgcatcaggtccttgtcttgcacaatatttatcatcatatgaccatttaattaatggccatggcattctattagtattttctaaatttggtggtaatgcaaaagttttaacaggtaaaccaattgaaatatcccaaataattaattttttaccaatatcttcatctttaaatggataatcatttcttaattcaggttttaaatctaatttattcataattggttcaggtgataaagtaactaaaaatttttcatttggtgaaatatcaattaatctaacacctggatgtaaatatttatgaattctatcaaaatttgatccaccccatgattgaacaccttgtgggaacattgaaaataaatatttaccctttggtgaccatttcatataagttgaagtccattgatttctaaatggtataacaggttcattttctaaattttttctaaaccaattaattccaactgattgatcataattaattaaaaattgatctctaacattattatcaattaaccaagaatttaaataaccaatttctttaaattttgggaataaaggttcctcaaattcattagaaattttacctgataaaacaaattcttcaatatcatttaatttattaactaataatctatgtttaatatctaattttttaccattaagtgaattaactgcctttgatgcttcaattgaattagaatatctaataattaaataacctttagttttaccatcttcaattggtaaataaatatcttcaattttaccacattgggaaaataatttatttaaaactttctttaaaactggtgctttactttcaggtgcaattggtgctccatcacaaagtacacatctatcaattaaactattttcttctttgacattatatttagattctaaatcactaaaatctaatgaacttaaatcaacactgttgacatcaaactctgcaacttcagtcattgtctatatgtctatcaccaaaagcaaaaatacaacaataaacgtgtataattgaaaattttttatttataattgaaaagacatgaaaaattggaaaaagttgaaaaatcgtccatttcacaaatttcattcacttttcaagtcccgtcgactcaacatgtcttcttttaagtagacttgtacacttatctactgacaaatggtacaacaactgtcattggtatcacatatagatgataaacaattaaataaactattattaacattacaggcattaaccggtacaaaaccatttgaaattaaacgtcatacaatcattttaaaaccaagaaatccatttttacctgatccaatacctggtaaaattaatcaaattgaaagttataaggcaagaataactagaatttggaatgaaaatgatggttatccattaaagggtgattcaataattaatcaaaataatggattaaatgaatcaatttggacattacaaattagtgatatacctgcaggtggtgaaaataatgttttaatacaaaatatttatgaaacaacaatttataaaactgatgatataattggttatttagaggaattaggttatatgcatgaagttgaattttgggttaaaggttggagattttattataataatataatttttgaaataagtaaattattattaattgataataataataataatgatgatgatgatgttattaatattgataatgataatgaaaatactaataatataaataacttaacaaaattaaaagattttgatgataagggaatttatttctataaaggcagtttgttaatataagttcatttaatgatttagagagtgttgcaattggtaaaaagaatttacttgatttaaaatctcaattacaagacttaattgatttacatatacctgatagattattaatggatagtagaattaattatacaaatcataaaattatataattatatatcaaacactactcttcatcactttcgtataatcctccatttataatatactctccatcaatatcactatcatttccttcaatatcttcaaaatcttcaaaatcttcaaaattattaaatttagtagtttgattagtttgataattatttaattgattgaaaatctttggtgaattcatttcaactggtctagtaagtatattcattaatgattgtgattgtaattgatttgtatcttgaacaataggttcaggtttcttcagtatgtttaataattgtgatgatggatcagacacaacactttctggacttttaggactattaattgaaggactctttaacatatttaataattgtaatgatggatcagtattaggagtttcaggtttctttaaaatattaagtaagtttgctgatggatcagtatttgtagtttctggctttttcagaatatttagtaactgtgcagatggatcaacttttggtgtttctggtttctttaaaatatttaataattgtgatgatggatcaatagatttattctctggagttttgattatatttaataactgtgatgatgtagatgatggtggaggtgaggtgatgataaatcagttgccatttgttggttttttcaataaattcaataaattagcagatggatcaataggtgcagattttatttcagtttcaaattcaggttttttcaatatatttaataattgactagatgaatcattatttgattgttgtaaatgaattggagtttcaggtttttttaaaatatttaataattgtgcagatgggtcattatttttactatcatttggttctgttaagaaacttaatgaatcaactgaaatattatcttgagttcttggttttaaagttttaaaattaggttctgttgattctatttctttttcgatttgttcaggttcctcatttttttcattatcattttcattagttttttgattattcataaattcattaatatttgattttttcagtaataaaattggtttaccattagaaatatttgatctaattgatgatgaagttgttgaattagcaggttgtgtaatatctaatggaatttccttttcaattggtttagtaattgattctttaattgattctttgattatttttcggttctaatttattttcaattggtttttcacgtttaagtattctaattggggtatttgatgatgataagatgaagatggtggtgataatgatgatgatgattgagaagttgttggatttttcaaaagattcaataaatcagcacttttattatatattattattattattatcttttggtgaagatgaaggttttaattttaaaatattcaacaattctttactattttcaggatttaattttttatgagacattgaaaattgaggttttgcaaatgttgaagcagatggtgaatttgtcatatttggtgcaattaaactattttgttgtaataattgaggtaatggttgaatgttattattattattattgtgattagattgtaaatgaggtaaatgattaatatttaattgattagcaaatggtgaaaaatatgggttaaacatttgtaatgggaaatgagcatgttgattatttgggaatggaggttgttgagtaaatctattttgtaatgaatgaggtggtaataaatgataaggtaatgaaggattaagtgttctatattgttgttgatataacatttgttgttgttgttgaagaatagggttattgatttgttgattaatattattattagtatcattagaagaaacatttgaatctgaagttgtaggtaaattatcagttgaatcattttgaggtttaattgcagatttaagtattgctaataattctctacccggatcattaatttgatcattatttgtagtattgtctgtaacttcattaacaatattattattattagtagtagtagtggtagtattagaattattactatcattttcaattgaataaccatctaaacctaaaattttctttaattgaatagttgctaattgttttaatttttcatcagattcattattctttattcttttaatataagaactaatttgttttaacattgcaccaactaaataaaaattacttgtatttttagttgctttatttaaatatttaatatccatccattgaatatcaacaatttcatatctaacttttggtataaatttaatattatcaggtacatttttaataatataaattttataatttttacccttaattgttctttcaacgaaaatttcttcatcaattaaatttgaagcatcaaaacctgtttcttcctctaattctcttaatgcacaatctaaatcagattcatcttttgaaattttacctctcgggaatccccaacttgaactttcaatacctttaactaataatattttatctaatgaattatttaataaacaacaacctctaacaggtatagttgatttatatttaccaaataatgttaaagcattatttggatctccccatttccaaataagtggacattgatcaattaatttatttgtaaattgtttcattttcattgaaggtaaaagaggatttaaagttctaaggaaatcttgataaaaccaatgagcttcctcaatttgaaataaaactctttcaattgaagataaatcttcctctggacaattaacgataaatctaactaataaatcttccaaacatctctccaaagattcattaacaaacccttcctttaatgggattgacattttattctatgtattgtatataatataatataataagctgtgtgtgctatactaaaagaaggtataattacaataccaataataaaataaggacagataccaaataatcgacgttgataatatttcatcatataatataattgaatagtctcatatagtgaaaatttacaacttcgcgggttttcacttgtaacaaagtggtattcttatattatattctaattaaaaatattacagttatagatcaagaattaaatttgtatatagttagttatattatgtatgtatgtgtttatgtttatatttatatttattaacaacttcttctatctctccaaacatctctctcatttctgtagaatcaagttgtttctcaaagagatatttgatacaactttcaagatcatcacatttttcttggtgtttaagttgatacgtattaccaggaataacttcttcttcatcttcatctttttcgtaatttaattcatcatcactgtttttatcatcttgaatatcttcattactttggtcattaatttctaaatcgtattcatcatcattgatttcaataacatcttcattttcttcctctggaaatctatacttcatcaattttctatccatcacatgaataatctttctcatcattttcaccttcttgtttttctgattaatcgtttcatttgataatatctcattacttttatagaaatcaaacataacatgactacatggaatattaagaactcgaggaatgatacattcaacacatggtttcaacttttctattgcaaatttacttctactgaatacttttgctaaatcaacaccttctttcttattaatacattcaaaaaaattgttaaattccgaaacaaagcaactttttcctatataatcaagtttactatagtatctcatatctttaataattggatttggatttaaagattgtaacttttcagttaacaatctttcttgtttgttgaaaaaaatttcaagtttatcaaataaattaattaaattgttctcatttttaattttattgattttcaaatcattatgggatatttcacttggttctatggttctagcaaatgattgaaactcctttgctatttcaataagattcttttgatcagtattgtcatgggaaatagaaatttcttgacaaatactgggcaaattaccttcatttccattataaataacattatcattatcatcatcaacagcattcaacaaagtattcgtaacctttataccatgcttttcgaacaccgttttcaatatgaataaaagcttgttagatttcattgcaaaaagagagtatttttcattcatttcatcaaattcttcttgtgaattcaattttatcaccatttttcgttttttggtaagtttcagtttcgaaattctaaaatacaaagcccattctgctcttgaaataaaaagtatgttcaattgatagatacaattttggtaaaacttaatagcttcttcaatagtttctttagtatacactacttttctccccttcatattagtagatcttttaatcatttttatatgacaggtttcaaaaaaccccatacacaacttttgcttcaattcatccaaccttttatcacacctaacaacaacagaagcaaaaattctcaaaaaatttgctcttgaaaaagcatacattgcatcaataacaccaaaagtagtgaacatatcaaagtttttctccatgttcataatcttattcttaacacaatgtgtaatcctaactttgttactaaaagctcttgaagtactaataacccctgcttttgattcatcaataattacggtatctactttaagtggtcctttgtgattttcctttatcagttcaagtaacttcttgaaaaactgagtatagttagcagtatttcctcttccaggcaatgttgcaacagcgcataggataactgaactcttcttaccaatcatttccctttcaatggaaactgtgatgagtttaacattacaatcttgtagtgtacttaaagtaatatctgaactccaccatgaagcatttgcaagtgcttccaaacatttctttgatgaaaatataagtgccctttcaaaatctaatgactctgaataactgaacgagctaataacattatctttcctcatatctactaacctaaatcgaccattcaatttacctacaacttgatcaactgctaaagctttctcaaattcatgcaaagagacgttatagtctccccagtttatccctttgaaaatatgttctgattttacatttcttctgtgagcccaagaatgaacaattttgttatctggaaagggacctatatcatcgattattcccatattttgataatatttttcttgaattgatttataggttttattatattttttgtaattatcaatagcaatattttgaaaagctctatatccaacgtttttatttctttcataacattcttcaacgtgtttacctgtgactttcattattacaatttgatgaagacaatcaataataatcgttattttccgatcacaaccatcacaagaaaagaaacattccttttcaataagtgatacataacctaaaaatttttctgtaatataaggtctcttatcatctttcattttcatcaataagccacttaattcttgaatttgtgcaaaagttaaagcacagtatctccctgaagccatattatttatctgagctgcttgttcatatcttgcctttaaaattgaaggtagaataacgagattatgtgtgaatattgttttataagcaagcaatggatctaaagtttctgattctgatgtgaaatcgtgtctccaaattgattctatacaattgagtttatcatcatgacaatcaatccccttgattgatggagcaaatactattccaacagttgtaggatctagcacatgttttactaaatatttgatatatttagaatatggaaatccaccctcttgaataacaggataaaaagtacaacttccaatactcaagcaataatctttaaattcatcaactgtcacaacagttgatggaatgaaatcgtagaaataattgtcatcatcaattgcatatttagagcatattatttcctttttttttatcaagtatttaaagtcaggcatgtcaggcatgtcaacttgatctaaatcaaatggcatatttgcttgtttaaacaaaatgggattcacagtagcattgcttgtacaaagaagattcgttcagtctgttgaaattaattataacaattctctaatttaaaatgtcttcacattatgtaagcagttttcaaaaattgcacttatacttgctgattctgctcagtgtgatttagtatttaaaataatttattaggaaggatcaatgtaaatgatgatatttgtgcctttggaggacagattagaatattagtggagtattgtgttgcatttcgctgatttgattgatttttgataaatttgaatatgtggatggtgatattacattcattaataacatgtctaattggcttcccattgaatggaaggccacatagacagctactataaaattgttgttttttaacgaaatgcaccacaatactctactaatattctaatctgtcctccaaaggcacaaatatcatcatttacatttatcaacaatttcattaaatttcttgtctattgtcatagggtagcttatgccaagagacctgaaatattacaatgggaaaatgagaatattatagaagatacttactgggatttcaaataccggtaaggcttccatcttattcttaggtttccacacttcacacttttcttttacaaactaatcacacataataattaacaatttaaccatttattacagttctttttcaaaacaaagcttaaactacaagctctatcagttcatttacccagtcaacttctgtattactataaatttataaaagatactataaatatttttctctaaaataaatgctatataataaaacattcagtccggttaagggaaaggaaaatcctagaaaacccttttgttatattgtaaaattaaatgaaaaatgaaaaagaacttaaagagtaaatggaggcaaactttatttagttaatattatcctacttactactacatatttatcacgctaaaaaacgcgatttttttttatttcctgaacaacatctttgtgactttccgcactaacaaatgtagccctttttcttatctgacctctagttatcgagttatagccctttgaagtcgattttttcgatttttcaaacgttcatatctttttctttatgagtctttgaaacacgctcaatggttcattagatttgtagttgtctgaagtttacttagtaaatttcttgggatcatgggagctttcctccgtcctcgaaagacatttttagttttttgactttttgtccatttttgaccacttttaacaggctctagctctttcaaacaccctcccaggtatacttttgaaaaattcagcatatagctcgtcataatctctttttaatgacactacttatagcttgtcacaatttggtaaagtactttaagtatccagttttcagtaaattttggacgttttttttagaaatttttcaagctagctgttttgttactttttgttaacaacttttaatgtttagaaactcattttgtagatgtgtttttaaattattaactgatgtaaattatgggtgaaaccgggtttttaaaaaaatgttatgatttaatgtgttcaaattttgctcttttttttcagcaaaaaatattaaaatagaaataacttttttttgaggcaaaattggagatgagatatttgatattttgtagaacaactgtttctctttcgtttggtactattcacgcccaatttaaaagagattgaaaagcgtagttccttaaattaacgctgattttaacgcttttcaaatagttatagtgatagttgattacgtaaacgcgtatctaaaattcatgtacccattttttcatgttataaatttattacccagtgtctacagatttaatggtttctttacagtttacaccattgtagtgacatttgttgttattagtttgttattagaagttgaatatgtagtagtgagtaggggtcaaaatttcccgtagggaaattgaaattaccaaacccaacgcattaagcgtcagtttcccctttaggggaaatgacaaaagagtcgattaggttcgtcacgcggaaactatttttttttttttttttttttgaacaaacgaagttaaaatatatacttgcttacataatattatatactgtttacagatttgttacttacttggttctttgattgttgaaccttcacatttttgtaattgtttttttattatattgtgtattcaagttgtgtttgtttatttttctgaattaattttgtttatactgattcttggtagaatagcagtataagtttttgtatgttatgatttttctttatttctgccgagttaaattctgaatttgttttaaatttcttatataactttttttggcaaaaaataatgaattggatcattttatttattgttttcagttccgaaattgacgtttcggtctcgaaaatttgatgaatttgtagctttttcttgttatttttagtttgaaatgatgtgcagtactcattgataatttcacattcgaaaatagtgtgattgaggtttcctttttgattgcaaaatttgcattgtgaatgaaacgtatttgctagtaaacctactagtgcttcaaacacttggttgtattatacctatataactaattaagtgcgtgtctttttcaagtatgcttacataataaatgtgtctttttttaaattgattacataatctttatgtttatactctatattttatagttttgctctttcaaaaggcgcaattaaatagacagcgcgcgcaaaaaaaaggaacaaaaaaatacatcaaaaattgttcagtgacgttttactggatgcaccgagtaaatgaactgataaagaaatgtaatagatggttaaattgtttatttttttgtgtgattattgtgaagtgttgaaacctaagaataagatggaagccttaagacatgtgactccaccactaccggggtaacaaaacacttaaaaaaaacaacaaattccttgttagctcagtcggtagagcgttcggcttttaagaattctactaagaagtcgaccgaaatgtccagggttcgagcccctgataaggagtttaaacaattttttttcaatgtctgtctgatctatcgatattaatggaaagaagtatattttgatttaaagtaatggataatatacttgatttcattttcttttttcttcaataaacatataatatttaatacaagatgatgcccggaggaggagggaaatttcaagttgaagttgatccaactgaagatactgaatggaatgatattttacgagataaaggtattataccaccaaaggaaagtgatggtaaggcagaattagaggaaatgattgatgaagcaattaaatccaattatgaaaatagattagaaggtaaagatttagatgaattagaggaacttgaaggattagaggatgatgatttccttgagatgtataaaaataagagaattaatgaaatgaaaaatttacagaaaaataatgataaattatttggtcaagtaattgaaattagtaaacctgattggaatgttgaaattactgaagcaagtgaaaaatatacagttttcgttcatttaaagaatgaatcaattttacaatcaagattattaagtttaattttaaggaaagtttcaaatgattataaaaatattaaatttgttgaaattgaaagtaagagagcaattgaaaattatcctgataataattgtccaactatattaatttataaaaatggtgaattaattaaacaattagttactttattaatgttaaatggtaatgatactaaaagtaatgatattgttaaattattagttgatttaaaatgtattgatgaaaaggtatatgaaaaaaatagagaattagaattagaggaagaatttaataataataatgcatccgatgatgattatgatgatgacgatgatttctttaattaattaattaaccatacaataaaataacatataaccattaacttttttaataaaagattcagaaactcttgtaacatttgcatcatcaaatttaaaccataaaccattattattcttaacataagctaaataatgacctgtattaacattaccaatatgacaaataattgaaaataattcataattaataattgtttcattatttgataaataatcatttatatttaaaattaatggtatatcaatatgatgatctaattttgaacttataccaaaatgtttaaaccttttcaattgaattgataaaattttaggtaatttatttaattttaaattttttgtaacttttgtacgtttttcacaataattacaataatataattcatcaagtaattcaatatttgtaaattttttcaaacaatcatttaaatttgttaaattattattatttaaatcttgaatttctaatgataaatctaacattggatcaattatttctctaaatttaccacaaactgtacattttaaagttgattttaaagtacctgaaaaagttttatgaataatacattgacaactatttgaatgattatgttgtaaatttgttgttgaaggtgaaggtgaaattgatgttgaagaagatgatgatgtattggtattattattattttctatatttttatttattaaatcatttttagaatttttatgaatttgatgaattaagaattgccaaaattcatgagcatcttgttctgtataaccagctaacgattttttaattttccaagaattttcaattaaatttgtaataccgaatggtataattgaaggatttgtgaaaaaatcttgaaaaattaaatttaatgaacaagataaacaattttcaatattacaattaatatgattatgataaccatttaaataataattccttataaaaggattatgtataattgattgtaaaattgatgacataaagcaagttgcacctaaattaatgaaaccttttaatgaattaaattctttgaatgatggtaatcttgaattttcattaattagttttaaattatttgataatgaattataatttaataattgatgataaattggtatatcacatttataacaaaataatataccatttgatgaattaattgcaaatatatgatttgaagattttgcatgttgaaatgaatgatttttagattgaatatgattataacaaccaacaaatgaacattgtaaacacatataagttattgatgaaatgacaattaggatgtgaacatttcagtactttccaacgtattcgacgtagtttatcatctttcttattatcattattatcattattatcattattattactataatgaacgattttcaatgcagttgaataagttttcagtactgtatctctggattttgattccaatactttgttaatatgaggacatgacattatatactgtgtatactattctataaaggctaaaaagagagagatctgataaagaacaaagtttcattatagaattattattggataatcagatcaaaattattttaatcactattaagtaatataatagtagaattttcatggggagcgctactgggagtgcccattggagagttccccagtggagatggaatagagggattagtagatgacatagtagatggcatattcttaaaggaagtatcacaacagacaacaagaagagatgatgtaccttccaaatgaacagtatcaactattgattgtaatggggatgtagttatattatcccatttacgtagacgtcgtcgagttgataaatcccaaagacatatactattttgaccacctgataacaatttacccttaccgaaaggtattaaagtaccaacaggaccagctaatggtggattatttgaacttctatgagctctgaaaatatatttatccatttgaatattagtaattttattattagttacaattggagcacctaatgcagcagttgttaaagtaactgttggttcacccattattgaagaagataattgaaatttaccaacagcaattttaccttctaacccaccacaggcccaataaatttcatcatttaatgaatcattataaattatagttaatgaagttataattggtattttaaatccacttgaaccattccaaattttttcataaataccagttttaccattaatccaaagactaattataccatcaattgttgaaataataacaatttcaatattatcatttataattgaaattgatactttttgtatacagttatcatcaccacctgtacctgtattaaattcatttaatatttcccaacctggtaatgccattatttgtactttcccatttaaataaccaataattgccattgaaccatcatttgaagttgcaattgatgaaataatatcatcatcattataactactctctttcaatacaattaaatccaaattcatatcctttatattccttgtatcaattttaatacgtaatatagtaccattatataatacgataatacaaccacattcaaatccactattaattaatccaatagttgtagattgtaaatctttacaaattaggagattaccagatgataattcaaatacaccaatccatccattgattgtactcactactacatattctccatacactacagtgcccgtaacataccctggaatgtccctaattatcatcattcaccagaaagatgaagaacaagtggtaattatataatactttaataaacaaagtgaaaaataaaaaatttgaaattcggcgatatccgcttaataagagagataagctttatcttccattaccaatttcttctttcttatttaaagagtgtactttcctcttttctggtctggtaagctttgctgatactaacatacaatgtacttctttgaagcaaccgagaggaaaagatatgcacaggttgcatgtgcagttatttggtgtttattcggtgcaggtccaattttcggttttgctgccttaaaaccaactcttatcgatcaaggtgtttatgcaaatgtttgtaatattaatagtaatagtactaatattgacgatatcaatatttcatctacaatggtatttttatctaaaatttatccaattcattcaaatacattatctaattgtattgaacaagatttaaaattaaatatgatgtttacagttggtgcagctttaactaatgtttcagctttaattattggttcaactttagatttttatggtccaagaatttgtggtttaattggtgcatttttccttttattagcatcaattattttcatttattcatcatcaattgaaatttttgatccttatttaattggttattcattaatggcattaggtggtccattttcttatatttcatcatttcaattaagtaatgcattccctgaaaaatctggtttaattttagctttattaacaggtgctttcgatacatcatcagcaattttcttaatttataataaattatacaattataattcaaattttttcactttaatgaatttttacaaaatttatttaattgtaccaattttcattataattgttcaattaactattatgccaaatgaatcatatttaactccaccacctgaattaattccaaatccaacagatgaacaaagagctttatcaattgctgcagcaaatgaaaatttaattcatagtactacaagtaataataatgaagagggagaagaagatgaagaaattaatgaagtacaaccattattaatgagaagacgttcatcacttggtgatgcatataaatctacatatattgaagaagaaattgaagaattaacaaaatctaaaacagaattttcatattcaattttcggtatacttcatggtaaatcagctgaatatcaatttaaatcatggtggtttatacttatttgtttatttgcaacaattcaaatgttaagattaaattattttgttgcaacaattaattcacaatatgtttatttattaaaatcaaataaattagcagattcattaaataaaattttcgatattgcattaccattaggtggtataatttcaattccatttgttggtattttcttagataatttttcaacttatattgtaatgattataattttaattatttcattaattattggaattttaggtataattgaaaattcatttatttcaggtgttataaatgttttaatatttgtttgttatagaccatttttttatacatcaatttcagattattgtgcaaaagttttcggatttgaaacttttggtttaatttatggttcaattatgacttgttcaggtattttcaattttttacaatcattattagataatttaactcatacaaaatttaatatgaatccaattccattaaatttattattaataattataactttaataattggattatcaacagttacctatattaccattcaaacaagaaactatgcaactcaaagattccaatcagcaaataactcaaattaactatataactctctctctctataattatatattatataaaaaccctattaaaaccctgttactgaatattatcgcgtatattattaaagtcttttacgttggagagttttttacttcacttactactactatacttcttctttcactaaagcaagacctcttcgaagatcccctcatcgatccaaatggtgttaggattcaaagcgaggtcaagataaatgatagtctttataattattatattaatatattgactttccttgaattctttaaataaactaatttcgtttatggtttaagttaattcattgatacaaattatatacaatactaatctaaatcagtaatatttcttaaattcataactctttcaggttccattgaatcaataaaatcttttaattctaatggtcttaaagtgatttcattattaaaattattctccttttcactatcattaattatatttttacgtataaattctcttgttgaattaattgcagcatttctacataattcctttaaatcagatccacttaaaccattggtaattggaactaattcacttaattggaaattaattttaatatcttttaataatttttctaaaattaataatctttgttcatcatttggtaatttaatattaaatttttttggcatacgtcttaaaaatgctgaatcaatatcatttggtctatttgttgcacctaaaattaaaattctaccactattaattaaaccatcccataatgtcataaattctgcctttaaagttgcagttacttcatgatcatttgaattacgttcccttaaaaatgaatcaatttcatcaataaatataatacatggttgtaatttatttgctaatgaaaataatgcatcaattaatttattactctctccaaaccatttatccataattgttgacattctaatacttataaaattagatttactctcctttgctaatgctttagctaacattgttttaccacatcctggtggtccataaagtaatacaccctttggtgctgataataatgaaccatattgtttaaataaatttggataaactaatggtaatataacactttcttgtaaatcattaataatttcatttaatcctccaatatcttgaaatgatgtatcaatctcttctggtgttattaaatatgctaataaaattttttcataatttgataatgaattgattatattatttaattcaggtgattgtttctttaaatttgaaatatgtttatttgtacgttccttttcatcattatttctatgacttggatcatttaaaaatgttgataaaatataataaactgaaaatgatgcagttgataataatacacattcacttaataacttgaatacttcttgtttgttcataatagattactagtttgttaataaagagttgtctacataaagaacctacagtcagttccccatagtaataatatcaaatataccatattaaatttcatgttacctaatttgaaaaaattataaaaagtttcattacttaatcattgatcctctatagaataactccaattatcataaactgattggactttacatactttaccatttaattgatatctactaataattactgaatgaccacctaaatttaaataagttaatttaggtaatttttcagcaatttttaatataattggtaaaagtaaatcaaaataaattttcaaatttattgaatttaaaattaatgaattaattgaaatttcattaactttaataattggtttataatttaaattaattgttgaattattttcaaaattaataaatcttgaataaagacaacgtataattaatgcaactttacgttgatttgattcattaattattttttgataatttaaatttatattttcaccttctttaataaatggtaaccaattgaaaaggaaatcaggtattgttaattcaattaaattttggaaattaaataatttattgaaaatttcttgttttctattaaggtattcatctgttaaaacaaacttattatatgaattaataccttctttaactggttcaacaagtgttataaaattatttaaacaaattgtaagtgatttaagggaaggtatgttattattattattaatattttggaataaatttaaattattaattaatgcaaaacataaatttgaatcatcgaaaatttcatttttgaaaatattatcagttaacatattatgattatttaaattaattattgaaatttcctctaaaagtgaataattttcaataattttattcaatttattaataaaattaatattattattaatattaattatattaaaatttgaaatattttgatatgaggttctcttaaatttaatttctaatgattttaatgatgataaaattgagaaattttgtaaaattgaaattaaattattaatttcataattattatcagatattgctaatgataatgattttaagttaggtaagttgattatgttattattattattattgaaatatgaattaaatattgataatgattgaaaattagttattttaagtgaaattaaattattcaataattgagaaggtaatgaaggtaatgatggataatttgataaatttgataaattatgatctatggaggttaaatttgaaattgaattaggttttttaatattaaattctaaatattttaaatttaaggattgatgatgattattattttgaataaatgaattaaataaataaatatcatcaaatgagaataattgaattgaaattaaatttgataaaatattaaaagaggtaggatattgttttatatcgttataatagttattattattattattataatcataatcatcaataaaatcaatttgatcattttcataaattaaattatgatggatgtgagggttggtatttataatatgaatattattgttgtcaatattgatattatcaatattattatcaaataatgagataaaggaatcaatttgacaattaaaattaatgaaattaacattttttccacaaatttttaaaattttcttaatattgttaataatattatcattattatcaatagtattattattaaatgaatcaaattgaattttattaataaattgaataaattgaggattaattgataataaatcaacaaatgaagttatatttgtataaggtatgaaagttatttcattgaaaatattattattaatcaattgattattatcattatagaaatagatgttattgaaaattttaaaatttgaataataattaagatatttacaagataattttaaattaataatggattgagtatttaaattattgtaaattatgtcaattatattatcaggtaaatctaataagttcattgttgttaaaaagaaggagatttaagaaaagaaagaagtgtatataaaaaataaattctgtggtggcttttataattataataataaacccttatttgaaattatatatgtgtcaaatcagtgatctataattttgacacattttaattattttaattatttctattatttctattatttctattattatctatttttaaaaaatgtgggggattaaaatcatattacgtaatattttatttgattacataagagtcacgtgacgtattattatcaccgagaaattgtcggaggtaaggatattaataattaatctctgatatagtagaggcttagtgctttttctttgatttgatttgatttgatttgatttctcttatttaaataatgaataataacaatacagtatccactaaaccttcaaaagcttgtgatgcttgtaggaagaggaaaattaaatgtgaattatcagatgataataatattatctgtattagatgtaatttgaaaaatattcaatgtacttataattatgtttataaaaaagagagaggaaaattattgataataaaaataatatagatatagatactaatccaaagaagaaaagaggtagaccaaggaaagataataattctatatcaaatgattatttattacaaccaaatttaaatcaaaatgatatttattataaattaaatgaatcttcaattttacttaataaaattttaaatgattctcaaattgataataatattaatatcaataatattaataataatattaacaataatattaataataatattaataataatattaacaataatattaacaatacccaacatattcctttacaaaatgttgaagatagattaagtaaaatggaatcattaattaattcattaatcgaaaaatcatcaccaaatttaatacaaccaaatccattatcaaattcttcaccttataactcaataaatacacttattcaaaataataataatatgatcactactattactaataataatgataataataataacaacaacaacaataataatctagatgataattatttaaaattacataaatgtgaaggtttatttatgcatacatcacttttctttctttcaactcttggtataaatattttagaatcaaaaattaatgataaaaatgtcttaaaacctttaactaaatttttacaatatagttcaatttatgaaaaaaatattataaataattggattgaaccaattaatgaaaataatttaactcctttaccaaatagagatttaattaatttattaattgaaaattttgaccttttgtgctttactttatgatgtaattaatattgaaaatttgaaaaatttattaaattcttattgtgattttagagatggtattttaaataatgaaaatgaaccaattttcactaattcagattattttttaatgaatacttcattattaattggttgtttattaattactactgattttaaatcaataataatagttataataataatattaataacactaatataattcaactttaaattttgaaattattgaagaaaatttattaaaaaattcaattttttattatcataaaatttcaattatttcaaatgatttaaattcaattattggttgtttattattatcaatttatgctgatactatatcaatttcaaaggcaacttatttaatttcaagtactgctataagatcagctcaacaattaggtttacatttagaagaatcttatagaggtttatcaactaaagatcgaaatttaagattaaatatttggtggttctgttatgcatttgataaagaaatttgttcaagatggggtcaagcttctattattaatgataatgatatttcaactccatttttaccaggttttgaaagtttttattcaccaaatcttgatattaataataataaaaataagaagaatataataatcataatataatcataatagtaatgctcctagtaataatcagaaaacaactaaaagatcattaattggatgtgaaattcttaatgttttaaatccaatgattgataattttgaagattgtaaaaatttagaacactttgttacaattgattttgcatttataatttcaaaagtttataataatttccttaggagcaaattcaatgaaaaatttatcattaattgaaattaaggaaagattaaatgaaactttaaatgaaattgaaaattggagaaataatatacctaaaaaattacgacctgataattcattaaataattttgaatttaatgaaaatattgaaattttgaaaaataaaaatgataaattttccaattataaaatgattagttgcacttggatttaatgttaaatatcatcatattaaattaatggttttcatagctttattcaaaatattgttatttagaatttggtaaagaatgtattgaaagggaaatttatttaaatccaataatatcagctagatgtattttaaaaatgtcatgtattgttgattcaagatttggtaattatgcaaattatttcatattttatccatttaatgcatttttaacaatttgttcatcatatatttatttagataatgaattaaatttaaataaatttgaaattattgaagattttaaattattaattgattgtgttaaattacatattgaaccatttcaaaatattcataataaattagcaagtagatataaattagttagtttaattttaaaatcaatgttatatgcaacttataaatcatgtattgaaaaatatggtgaatttactaatgaatataaaattgatggaattgaaattttaaatgatattgatgatattgtaaaacaaaataaaaagccaattgatttattagatttaaatataaattattttaatgaattgaaaaatcataattataattcaactaaattaccatattttacaacaaataataatagctatagcaattctacttcaaataataatgataaaactccaacagtttcatttttattatcaccagataaatttgaacttaatagcaatgtaagttctcatactgacaatgaattaaatatccaggaaaacttctttcaaaacatgatgaatatacccaactatttcatggattttaccactgattaagagcaaattgtataacattacgtaatctttgtattgtatattataattaaagtggaaaattaacttttttctattattttgattaaacagcaacttcttttaaaacaacgatgaataaagtacttacttgtgatatagatacaacgatatacgatgcaagtatattaatgaaagaaagtaaattagattatatattaattacaaataatgatgaattagaaggtattgtaactactaaagatattggatttagtattaatttaaataataataataaattaattaaagatataatgacaaaagatccattatgtgcaattgaaggttctaaaatggaagatataattaatgtaatgattaataaaaaattccgtcatttaccaataattaataaagatagtaaaataattaatttaattgatattagagaatgttataattattcaattaataaattagagaaattatatagtaataataaaggtattgatgaaattttagaaattggtaaaattggtaatggtaaaataagtcaatatttgaaaaatttgaaaaaattattacaaggtccaatattaaatgatgttttacataatggtaataataaggtaatttattgtaatattaatgatagtgtttataaagttggtatgaaaatgaaagaatttaagagaactgcaattatagttaaagatgatgaaaatgataatgaaaatgttggaatatttacaacaaaagatttagttttcagagttataagtgaaaaattagatgtacataaaattaaaattggtgatgttatgactaaaagttttaaatttgcaaataaaaatatgaatattcatgatgcattagaaatgatgattaatggtaaatatttaaatttaccaattgttgatattgataatgataatgatgataacgatgataaaattattggtataattgatgttattaaactaatgagatttacattaaatcaaataaaaactttagaagaattaggtgaagatgatgaagatgaaaatgtagatatagatggtgataatgaagttcatgattatgatgaagaatatgctggtgatatttcaattgatgaaatacgagaatttgaaattactaagaatgataatattaaaattgaaaaaaatatttattttaaaattgataataatggtaagaaatttgtaattaaaatgaaaataagtaaaggatttccaaggttaaagaaagaaattttgaaaataattggtaagaaagatgttgaaattggatattatgaaagtggtgatttaattgaaattaatgatgatgaaagtttgaaaaattgtgttgaaattcaagatagtaaaatgattaatattgctattatcaaaagtagtggtgataataaaagtaataatactgatcataatgatagtgttaatgttggtatgggagttggagttggtatgggagtattaggtattggtatgtatttacttagacgtaggtgatatagtatattagaacatttagaacataatatgtgtgtaatatagtaatttattataataattaattaataataattatatacaagtaaaaataatgaatatacaatatcattattataattataattatacagcattcttttccattgaagcagcctttttaagtaattttttataagttttcctcttttgagcttcaaatacatgtttaccgatatgaacattagtacctttaaatgaatcaattggtaaatcaattgcatttggagtaaattcagtaatatttgaatttgcaagatttggatttaaaattttaataaggtaatcattaattaattgataatttgataaatttgcaatttgataatctggaatattaattgaaaaagttttctgaattgatttaaaaatatttaatttatcattaattggtatttgaattgttgtttgaatattatttttttggaaaatttcatttaatttatcatttataattaatttataattatcattatttaataataaatttgattttggaatccatttagaaactacaaacccatttaaattttgtttaataatttcaggatcagtataacgaggatttttaatacctaaaattgtaacttttggagcatcatttgcaacagtatcttgaatttcaacagctttttcatttgagactggtttaatagctggagttgaagattgtttatctgtttttttgaaaaaacggaaataatcaagcacagaaggagcagctctagttgatgaaaaggaacgtacagtacaaagagacatggtataggcagttgcttttgaaaagaagaagaagtagctgatgatatatattgtagtaatattattactggaaaatcatgaagtttgaaaaaaatttgactttctccaatttcagtcgcttctcttagagtctgagtctttctctattttatataggatatataggataggatatataggatatttattataggattgacactgaatatggaacatgatagtagacatgcaacgaggagacaagatgttgcaagtggatatgttttaaagactgcaacattgaatacattaaagaaaatttcacgtacaaggacattatatgttggtaaaattggaccaggtgttagtgaagaaatgatttattcaattttcaccaatgcaggtaatgttaataaagttataatgggagtttatgcacatacacatcaaccagcaggatttgcatttgttataatgaataatcataaagatgcaacaaatgctgttaaacatttaagaaagattagattagcaggtaatgcaattgatgttgatttagatgaaggatttgtagaaggtagacaatatgctagaagagagagaattattaataataataataattttagaggtaataatagaggtaatagaggtggttatagaggtggttatagagatggtagaggtggtaatagaggtggttatagagctaagagaagacgtgtgtaagtagtgtgtatattgtctgttattaattgtatattataagtgatgaatgttattaaactataagtaacaacataaatttttacaacatattatttactatacaatatatatatgatatcataataatataatttacatcagttaatgtatagtatatcagttaatagatcagttaatagatcagaaagaagttgaaagaatgaatgttataaatcttattcaacggaagtagtacagtatatggaattgaatccgaatatataaacaacaaacgtgccactaacacagcatatatgagcaaccaaagtgaatcatctatatcgatgatcactctaaaattggctactcataagatcttacactgtttatatagtacagtaatagtaactgtagttgatgtataatacaaatattgttactatcataaaaataataataataataataatacaacattcaatgtaactataagtaatggctggttttacagatttacaaacttttcttctcttatagattgctctatatgaagatatactttataaaagtgacacattggtcactactttcacctctccatatagttattatactagcagtgaatagaagaagtatatgtatgatataaaaccttatcaatagacctggctatttcctattatgttgtatatttcctttcccgttaataaccggtacggtattatggtacgtttacttttttttgtgttttatttagtaaagtttaaaaattataatagaaagtatacataagaatgtaggtattgtaaagtaaagtgttgtaaagtaaagtgttgtaaagtaaagcatatgaaatcaaagtaaagtaaagtaaagtaaagaaatgaaaaattgtaggaatattatacacttttaagaattgaaatgttaaagaaagcatgtgtaagtgatggataatattaaatgaaatgaaatgtaattataataaattaaacctttaattgaccctttaattcttcaatttcaatatctttctttttacattcatcttttaaaattaaaatatattcagtaactaaatcaagaattttcgatttatttaatttctttgaattatcattatcattttcattctcaatttgatcatcattttcatttccattttcattaactttattattgttattttcatgtgaaattgcctttttatgatcaatttcaaatgcaactccatcctctgacatccatggaactaatctttgtaaatttgcaatttttgaattaatattaattctatattttctttcaattttattatgtgctttacgttgaactaatgtcattggttttttaactctacttcttggtttctttgtagtggtatttgaactacctgtaggtattgatgcacttttagccttttaatttaactttagatttttcattgttattaacaattgatgaagatgatgttgtatatgaattaatttcttgaatttgatttgatgaaagtaattcaggtgctgataataaatgattatgcggtattatttgttcatacggtgtattattctcatcttgtaatccatactgataactagatgaacctaaataataattatgttcttcattattattagtgttattattattattattggtatcaattaatgaatttgattgtagagttggtgataaaactgaacttgttggacttaatgataatgaattaattgtatcattaactgaaattatttgaaaatttattatttgaattatagtttaggttgggtattattaacattattataatattctaattgattatttgattgtaataattcaacattaaataattgattattgttattattgattattatgattattatgattataattataagttatttattgaatcataggaagaaattgaacttgaagcacttggaactgttgaaaatgtattactattattattaaaatgattatttaaatgagaatcatcagtttcatgtaaatgattaacaacatcattatcaagttcagatgtccaatttggagtttgtaaatcatttaaagttccataaaatccttgtaacatattagtagacatattttattttatagtatatggtatatattatttatattatttaattagcaatatcaattgataattgagattgttttcttgcttgttagataagaagatataaagaaataaataaagtaaagttaattttttaaaatatttaaataaaatttttatacaaacatgtgcctaaaaggtctctttatataggaaattcagatgaaagcaaaatgaaaaaggctgaaaaaaaaatgaaaaatgcaaaatagaaaaaatagaaggaaagaataataaaatatcaaaacaatgaaatataataaaataaaataaagccacccattgacagaaaaaaaattaaatttaaaagtgatgatgctctatattatcttattatcttcatagtatctctattataaagataaagagggtaaataaggatgcggccaagtggtctttttagtttgctcgtctcggcaagtgtttgttttagcttatttaaaaccgaagtgataagagtttatgttggttggctatttattgtatttactgtatattattatattatattacattgtatggctgtttaaatcttacggagatagtgaagttaacttgtattaaggttaccataatgtcattattacagttgataaaataataaatcacctatcctatatataactaaaactgctaatagttatcttcaaagagaagctttttataataattagtgtagttaattagtctaaaaagtataaattaatgctctaatttgtttgtcgaatgatttcatatgattgttctattcaactattacctaaatctaagaatgtaaaacatgaaaaaaccactaaacggtacttaaaactcttattcgatgcatttacccccaaaaaatgccaagccctcaattacgatgtatttaacaataaccgacgagaaaaaaaattaggaaatcggagataaccactaagtaaattatagaaaaaaacttttttacttagtgcaccccgtcgtaaattgcattttttggtacttttccactaagcaatttaacattttcctcaaaatctatccttttgcctaattgggtaattagatctctcggtataatatcttgcccggtgctaatctattgtttattcattttataacaattgtaactatcatccaatctattaacacccctcagtcttatttatggtttatggttttacaaattttttcgttataaccttatttatcaatggttccattaaattggattaacagatttaatatcttatatcttatatttattatagtattgaatcttcattatatctgtaaaatctacagtattatcaaaagagagcaaaaatacacgtttttgctaaaatcttacaaaacttacttgctatatcgaatatatagcttcatcaataaacaaaatatagtaaaattactaattaaggttttacacttttcagctgatattattaaccttccaggtaactcttactaatcaggaaaaacttcaaaattgaggtttttttctggaaaaattgtttggctgtattttttttcctaatatattaaaaataatctacacaataattgctttatattatatcatatacataaatactatcacatttttttaaacatctctataaatcacttaaccaattatcgtaaatgaacctcttcaccacataattgaaacccctcactcaacaaatcaattacttgaaacgatttgacttcaacttaactctgtttctttcaccttttttaaattcaaatttaaaccctttaaccaaataaatccaattattagatttaaatctcttcttataaacttgtaaactttatgggctgagtcatactaaaggaactattgtaaaaatgattgtaaactcttcaaccgtaaatctatcctaagcccctcactggtcactggcttcgtacaaaacactccctaaaacatcgtttttcgtttcattattgttaaacatctgaaatacaatagtatctttgatgcatgatttattgacttatctttacttgacttcatgaataatctgaacagctatttacgagggtgtgaaacaagtttaaacaattctaaaaaaagaattttgaactaagttgatagttgagctgtgtgtacccaacaaaacttataaaatcaccatcaataaactaaagtaagctacttatatagactcaatttcccagtcatgtagttatttagtttaaaagtagtttaaaaatgtaaaataaaggaatgtccaatttgaaacgttgtgttgaaaacaaagcagcaaaaattattggtggaaaaaaataaagcacaacgttttttttggaaacttggaaactaaatcattaatatttttctaatgttacaaggatatgtaaaagctatatgttttagtattgatacatagtagcaatggttaaatagctaactcttgctttttaaaagaaatagggaaacaaaacaagaacaggtttgtcaacccaactgaaaaaaaaaaaattgttgtttttgttacataaactttaatatagtttacacaatatagtttaccacaaggtaaactataatacacagaaaaaaacataactaatagatactagctacccagtgtttataatatgctcaatttattgctgaaacaaatagcaaaagtgtgataaaagcataaattattgaaagtgtttaattaccatcaacatgattaatatttacttaagcacttatagcagtcagaaaaatgaacataaagatgagaaggtttgaagctaccagaaatagaaaacattatacatgagtataatatattatatccatgtgtgtagacaattcagaaatacacatgggtgtcaacacttcaaagttttcaataaagcactcaacaattgaccactacaaaactttcttgtacaatctacaggggaatatcatattaacaaataaaattaatatttcacaatacggggaatacactaatgaaggtgcttaactctcaatcatcattattcataatcattcaaaataatttgtttgacttattactcaatcattttctaaaagagtcaattgataattgaaatagagacaactacaggatttttaacattattaacttgctaccatactgtacaaaaagaagaatctagtccagtttgaaatgttctaagatccttgagaaaaatgtatagcagaaaaacagggaggtgattccaagtcaatttccacccataacaaattaaatttaatatacactattagatttggttttgactgagttgaatcaaacatataacactttaaaaataatggctttttagtttgtcagccaaaggttatcacattacaatctaatacacattgagtatgttaatctacagaaagcacattcaattatagaaagaaaaaaccagtcaaaaagagcaacttaaaataaatctgatcgttattcaaataacatgtattatagacttttgaaacaaaatacagcaatagcagcagtacctttaaacactcaaagaagaccataataatgattattaataataacgtaaggcaaaataccggcaccctcggaaaattggcaaaaagaaaaacacaaataaaaaaacgctgaaaattccgaaccgttcagtttcagtaaatttttttgactgcatgttgaagatgtaaattttttgtataattttttgtgactattaaagaaatactgttttttctttaatctattttatataacagattactctattgacaaactagtcacatctaagtgtttatagtcagttttatcactcaaaaaatctataatctgttgccaattttatcagttgtatgaataatatattgttcaaaaaatatttatctattacaacttcaaatttttttaaaaatattagcaataaacaattacctttaaaattagtgattaaacaaaataataaaaaatatttttcaactattaaacttttagatacaagaaaaatggaatctttaacagcaaatttaaaaaaaatggatttagttccaccacaaaatattgaaggttcattcccagaatttaatacagttgatttatgtagaaattatattactgaaaaattatctgaattatcaggtgtcgataaatcacttatttatcctgctcttgaatggtgtcaagttttagaaaagggtgatttacttttaccattaccaagattaagattaaagggtaatttagatgaaatggcaattgaatttgcagaaaaattcccacttggtggttatattgatcgtgttgttccacaaggtaaatttttacaattttactttaatacaaaatttttattaaattatgttaccaaggatgttttgactagaacaagtgaatttggttcatcaccattaggtaataataaaacaattattgttgaattttcttcaccaaatattgcaaaacctttccatgcaggtcatttaagatcgactattattggtggtttcttatcaaatttacatgaaaaattaggttggaatgttgttagaatgaattatttaggtgattggggtaaacaatttggtgttttagcagttggttttagaaaatatggttctgaagcagaattagaagctaatccaattcaacatttatttgatgtttatgttaaaattaataatgatatgactgcagaaaaggaagaagcagaagcaaagggtgaaactttagatccagaaaattgtattgatggtgaagcaagagcatttttcaaaggtatggagaatggtgatgaagaagcattaaaattatggaaaaaattcagagatttatcaattgaaagatatattggtacatatgctagattaaatattaaatatgatgtttattcaggtgaatcacaagtttcaaatgatgttatgaaggaagtttcaaatactttaaaggaaaaaaatatgattactgaagatagaggtgcattattaattgattttaagaatttaggtcaaaagaaattaggtaaagttttagttcaaaagagtgatggtacatcattatatattacaagagatttaggtgcagcaattgaaagaaaggaaaaatataattttgataaaatgatttatgttattgcatcacaacaagatttacatacaaaacaatttttcactgcattagatatgatgggtaataaatgggcaaaagatttagttcatgttaattttggtatggttttaggtatgtcaactagaaaaggtacagttgttttccttgatgatattttagaagctgttaaggctaaaatgcttgaaattatgcaaacaaatgcagaaaaatttgcacaagttgaagatcctgaaaaagttgcagatttagttggtatttcagctgttatgattcaagatatgcaagcaaagagaattaataattatgaatttggatgggatagaatgttatcatcagaaggtgatacaggaccatatttacaatatgcacattcaagattaagatcaattcaaagaaatgctaatgttccagatgaagaacttttagaagctaatttatcattagataatgtttgtggttcattagataaattaaaggaacaaaatttatcagatgaagaatttgaaaagaaatctaaattattagaatctcaattagagaaaacacaggcattagttagaattatggcatcatatccagatactttaagatatgcatcaaagaattatgaaccatcaacaattgttacatatttatttaaacttacacatcaattttcttcaacttataaagttttacgtgttataggtgaagaaagagaaattatgattgccagattagcattattctcagcagttagacaaatcttacacaatggtatgacattacttggtattaccccagttgaaagaatgtaatgatttatattttgtaaataataaataaactatagttaataactaataataaacttccccataagtaacaatccccggattctgtgaagtaattccgcgattataataatatgacaaattactattagtaacaaaattattgaaatttttcatttggtctcatgatttataatgatttataatgatttataatagtttataatagtttatgataaataaatacattaacatttcctcttgtcattcagagtaaaagtatttactttcatatttaaaaacaaagatggttgaatttactccaatttctgaagctttagaagcttttaagaatggtgaatttcttgttgtaatggatgatgaagatagagaaaatgaaggtgatttaattattgcagctgaaaaagttgatactgcaaagatggcattcctagttaaacatagttcaggttatgtttgtgtaccattatcaacagagagagcagatgaattagaattaccatttatgattccagaagatgaaatgactgatagacatggtactgcttatacaattacggttgattatgcaaatggtacaacaacaggtattagtgctcatgatagagcattaactgctaaaatgttaggtacatcaacaagtaaggcaactgattttttaagacctggacatatttgtccattaagagcaaaacctggtttattaagaactagaccaggtcatactgaagcaggtgttcatctatgtcaattagcaggtttacaaccagctgctgcaatttgtgaattagttagagatgatgatggtttaatgatgcgtttacctgattgttgggaattctcacaaaaattcggtattaaaattattaccattaaagatttaattgcataccttgatgaaaacaatttataaacattttaaatatatacaaatacataatacagaatacaaagtacaaaataggatatacttttaaatgtaaggtatagttgtagtatagttaatctacggcttaccgtattttatatatttcagccttatgtaatattcgctgttgcttgtagaagagatcctgaatcattaaggctatcattacttcttttgccatcgtttttatagataactagaaccactttcataaaacttataaactagagacgatatgaatcgtttatttggaacaagtaataaaacaccaaaaccaacattagatgatgcaatgggtaatattgattcaagaatttcatcattagatgttaagataacgaaagttaatgcagaactttcaacttatcaacaaaaattatcaaaaatgagagatggaccagcaaaatcatcaattaaacaacgtgcacttaaattattacgtcagaggaaacaattagaaactcaaagagatcaattaatgtcacaaagttggaatatatcacaagctcaaatgacaacagaaaatttaaagaatacaatgattacagttgatgttatgcgtcaaactaataaagaactacgtaaaacttatggtaaaattgatattgataaattagaggatatgcaagatgaaatgctggatttaattgatcaatcaaatgaattacaatctgctttaggtcgttcgtatgatgtacctgatgatatttcagagagtgaacttgatgcagaattagaggctttaggtgatgaattagattttaatgatggtgtgacaaatgatggattaccaagttatttatcaaatcctcaacaagattataagttaccttcatttattgaagatgaaccaactaaaactgaagaaccttcagctccagttgcagaacaattataaattatattagactaatcctttcatcattacattaaaatttcatatcttataaagtttttgtatattatattatattttataaaattacacttttaacaacttattttgcttcttccttcacaagaacaactggttcaactacttctttccttttcaatgccatcatataatttcctatattagaactaggagtataaaaccatccaacagcgggaagatatgcacatcctttagaatctataatttcaaattcattctttaaagtattgacaaaagctctaatttctgattctttaatatatttagaaaaagtatgagtaccaagtggaacaattttaagaatatgttcacccatgaaaattgttgtaaaccaagaaactaaatctctattaattgtagataaaaagaaatatccacctggtttaacatgtgataatgctttatctaatacaattgccggataatcaacatgttctaacatttccatacatgtaactatatcatatttatttgaattagggatatcatctaatgaagttaatttatattcaagtttattacttaacattggatctaataatttatgttgatttgcaacttcaataactttaggtgtcatatcaattccagtaactttttcaacatttggtaaacgagctaatgattcggataataatccaccaccgcatccaatatctaaacattgtaatttcatttctttatacatattccaagttgcatcatctaattctttattaatttgatttgaaatttcctttggtaaaatattttcatgattccaacctggaataaataatttttcatcatctgtctctgcatctgcattgacttttatatgagatctaacattatctgaaataaaatccattcttaaaatattcattttatgtaaaattctttgtgatccatgactatcccaccatgttgatgcaagttgttggaaatgttccttttccgattgagttatactggtaaaattggatttgccagcattgaaatgacgtgataccgtactgaatcttctaaacattgttccttaaagaaggctttctaggtagagctcctttaacatgaaaattgaagtttacactgtacagagagggttttagaattttcttgatattgatgctcgcgtttagtattgtttggtcttacatcgaatggattttttattccctggtagatgaacaattgtttttctttctggtggattattagataactgtgtattacatagatgaatccactattttgaaataatatctagaataagggtaatataataaatgtcagatagtgaaagtgataattcaagaagtgattcagaacctgaatttgaatcaattattgcaactagagctcgcagatctaatgcaggttcaagattacgacaactaatcgatttagaagagacaaatgcaggtttaacaccatcaaatgaagatgatgaaaatgttaatctgctgtttcaagaagatgaagaagatgatgaatttgtagaatctaatgatgaaagtaacgctgaagagaataatcctgatgatgatgcagatgatgatggaaatgacaataatatgaaaaacaaagctaaaggacgaagaaaaaccaattctaaggaggaaagtgaagtagaagaaggggatgatgatatggatgaaaatctttcagattcagatataagtgcatctgatgatgatgaatctgaaggtgaaagagaacttcaaagacaagagagattgaatagacgaaagaagaggaaagcagattctattaccccatctttgaaaaagaaacaaaaatctaatacaactgttggtaaatcagttaagaaaacagagaaagttaaacaacctaaaccatctatattcgatagtgctccaatagctccaactagtagacgacattcttcaagaagcacaacactaaagaatagtatagaaacacatgaaaagatagagaaagagtttgaaagaagacaaactatagttcctgttgccaaaaaagaatacgttgagaaaacacttgaagagagacttgaggaagctaaaataaccgaacaagagaatattttatcattaactagattttatgaactagaagttcaaaagaaaaagaagcatagagatattgctaactctaagaaattaaaattgaaaagatttattagattttggagtaaaggtgtttatataactccaaatgatgaaattaaagaaattagagaagaacagaaaagaatggctgaagaagaggaaagaaagaataaaagaaaattagtatatttaagaagaaaaaatgctaaacttggtataaaaggtgaagtaacacttgaaatgttacaaacaaaggaaacatcacaacctgtaaataatacaataattccgcctattacacaatctgaaacccctatttctgacaatcaacctttggaaaacgataaagcggagaacaaggaaacaaaaactgttacgtttaatcaagatgttaagttttcagaaaatggtaaggatgaagaaatcaggaaattatcagttgagcctgaaactaacatacaagaagaggaaatgacaccacaaagtgaaatatccattgatgagaaccatgaagaaggagagcagaaggaatccgagaaggatattgaggaaaaggaacctatttatgaaggaccaccacaactagtagtgaaaaactatataatatttgaagaatttgataaagtgttaacaccggaaaacatcaagacaagattattaggaaaacaatcattacttgctggtacaagaagagatccattatgtgaaccattatgtacaataaagaaagatgagacatctaatatagatttacaaaaaatcaaagataatcgtagtgaatcatttaaatcattacttaaattaccgaaattcggtgagaaagttgtacttgaagataattcagataagaataatgaaaatgatgaagatattgttagaataaatacaccagcaccagttggtattcatttacctgatggacaaaagaaaatgtgtttaatttcaggacaacctgcagtatattatgatccagcaacgggtgtaccatatgctacagttgaatcatttaaagttattaaggctattgttgaaggtgaatatcaatggttacaactagataatggaggtgttaattctagatatgctggaggtattggatgttattggactaaaaaggatcaaagacctgcaaagggagtacctgaaggattttgaatgtatattacacacgtgtataatagttaaggaaaagagataagtgcttcttttttctttttttgttaaaatttattagtatattaataaaaagtttataaatgatgaattttgttgtttaattaatcaaagctattgttattatttaatctgtgttatgtctaagttttggttcatgagcagctattaaatcaggttgaaattttaagaatacttctttttgagcaactggtaagaaatgtttcttaattgcagattttttatcagattttgtagttttaatttcaaataagaaatcagattcatcataatcatgttcaaattctggtaaaatgatagtaacttcttcttcctcatcttcacttgatttaacattaacaatgaattctattttaagttcgaaaagacatctaacattaccctttctttgagtgacatcacaatcaccacttaaagattttaaacttttaacagtaaatacataatcatcttgaggaactgataaatttacaagattcttattaaaataatctgttgcccaaggaacacaatttttatcaacccagtgcctataaaaataagtatgttagtacattattccaaagaagaaaaaatataatacacaagcttaaatacggaacaatcaagatgattattatttagtgaatcactatttatatttttttcattaaatcatcaaaaattaaataaattatatacataccagttgtttggattatgcacagtagccattatctataatatatattgaaacttttaaatgcagtatggggtataagaatcaaagtgagagcaaagtaaagtgtgtgtagtgaaggacttatagaaactgaatttatagaaattcgaggaagacggaaagaaagcatctagaaaattccatgacggaagttaagttgattcattttcacagttttgactttccattatcattcttattatcattatcgttatggtctctttgatttgatatggtgaatgatataaataccatgagagagttgacaaaattagcccttgtctttggtgaatctaatctggatatattaaaggaacaaatattttcagtatccatccaaagtaataaaaatggattatcctcatcttgtaagtgtaatgtgaataaaggtttattaggaatttgtaattttttatgattaatattccgttcttccattttaagttgaattttattatatactttacgtattttatccattgacagagtagcagttgataagatcatcatgaatggtattgtagtaattttcatttttgttaaataatcaaatatgagtgaacgaatataaattaatttatgattacaattattattattttggaaataattattaatatcataaaaattaaaccatatagcaaatgcaattcgattatcatttatatcatgtaattgaacattaattattttcttattcttatttaattttggaaaaataattggttcaagttctttacgtatttctaaatatttaataatagcaggagttggtaatcttatataaccagaaaggaaattataccattccattggaactgcaaatattatattgtttaaatttagatagggattgagagtgtttcggacttcacatctgaataattcttgatttgtagatatacgatgttctaaactactgataatttgacatttcctatcatttttacttataatattgatattattattagtatcattattattactgactttagctcttttcgcagagattggtgatgatccaataagtgtatcagagttcattacagaattatatgattaattaatagcaaagaaagaataaaacataaaatataagttgagcagtaatgtgttagaataagtggttaaaatagtgaaattccattggaggctcatccatacctgttttttttttttttgaaaagtgatgagccatattcagtgcctttttttttattgattatcatttaaaaactgaagtatatcagctgtaactttagaacgaacttcaggtatatctgcaacgatgctatgtctaccgttggggtaagttataatttttttattattcatattttcaattgaattgagtttttcaataaaatttttacttgcttcaacatcattaacatgatcatcttcaccatgacaaattaataaaggtttatctttattaatctttgaataagtattatagttaagtaaatttctacctctaagtatgaaatctctcgtttcaacgaatgcaccatcaagacctttagtatcaccatttgataataaaaatttttgataatctggatcaccagtaatataatcaattttaattggacttttaactcttaattttttaccaccaagaaaacaaattgttctaacaactaattcaattggaaaaccaggataagtatctttatgaagagtaattaatggaccaataactgaaaatgatttaattttatttttaaatttaccatttgatgcataattaagtactaacccaccacccattgataatcccattaaatgtaatttatcaatatttaaatttttttcttttaaatcattaatattataatcaatcatatcatcaattcccttataagcataataatcattacttacacctctaatattattattaattaattttgattcaccttcaccacgttgatagaaaaagaaaaaatcataaccattaattgctaaagtttcagcaaattcattataaacgccaatatgatctctataaccatgaacgaataaaattctacctttccaattatctgatgaagctaaccatttataagttttaaagatacaatcatcaatagtaatttctccctcaaaaggtttaatagttttacaaatatgaggtgaatctatcggtgtcattattgtgtatatcagatgatgtatataccgttactattctatccaatacttatccaataaataatctgaccgttatatacatcaaaagtttatctaatcaaccagaaaaggaaagaaagtttatttaatatcaatatcagaaaaaaagaccaacaaaagacacagacgcgacgatacattaataataaatggaaatttgaggtccgtagtagtaaagggaaaaaataaaaaaatttgaaaattctattttactatggacaggtctggtcctctctaattattaatgaattattaatgacgtggatagcgatgatttatttaacattaataatctctactttctgatgtgatattatgattatttcacttatacccatctcttttagaggcaatacacacattcaatacacataaacaatgtctgaagcaaagtatgtactatatgttcaatatatcctgaaatttcatatcatatcatatcacgaatattcatactaacaattctcataattatattattatagaggtgatttcggtttaatcggtttagcagttatgggtcaaaatttgatccttaatgcagcagatcatggttttacagttgttgcatataatagaactgtttcaaaagttgatcatttcttagaaaatgaagcaaagggtaaatcaattattggtgctcattcaattgaagatttatgttcaaaattaaagagaccaagaagaattatgttattagttaaagcaggtaatccagttgatcaatttattgatcaattattaccttatttagaaaaagatgatattattattgatggtggtaattctcatttcccagatactaatagaagatatgatgaattaaagaagaaaggtatcttattcgttggttcaggtgtctcaggtggtgaagaaggtgctagatatggtccttctttaatgccaggtggtgcaaaggaagcatggcctcatattaaagatattttccaatcaatttcagctaaggctgataatgaaccttgttgtgattgggttggtgatgcaggtgcaggtcattatgttaaaatggttcataatggtattgaatatggtgatatgcaattaatttgtgaagcttatgatttaatgaaaagagttggtggtttaactgataaagaaatttctgatgttttcgctgattggaatactggtgtcttagattctttcttaattgaaattacaagagatattttagcttataatgatactgatggtactccaattgttgaaaaaatcttagatactgcaggtcaaaaaggtactggtaaatggactgcaattaatgcattagatttaggtatgccagttactttaattggtgaagcagtctttgcaagatgtttatcagctcttaaatctgaaagagaaagagcttcagaaattcttaatggtccagaaattgaaaaaatttcaactgcagagagaccacaatttattgaaaatttaaagcaagctttatatgcatcaaaaattatttcttatgctcaaggttttatgttaattagagaagctgcaaaggaatatggttgggaattaaatttcccttcaattgctcttatgtggagaggtggttgtattattagatcagttttcttaggtgaaattacttcagcttatagacaaaaccctgatttagaaaatttacttttccattcattcttccaagatgcaattcataaagctcaatcaggttggagaaaaactgttgcaactgctgttggttcaggtattccaactcctgcattttcaactgctttatcattttatgatggttatagatcaaagaaattaccagctaatttattacaagctcaaagagattattttggtgctcatactttccaaattttaccagaatttgctgatgaaaatagaaaagttggtgattacattcatgttaactggactggtaaaggtggtaatgtctctgcatctacttacgacgcataatttaaatgaattatttataatattataatataataatacataattagtaaaattttatatatcagttataatttttaatacgtatatgagttattatgactttctttctaataaaattgcagctctgttatataattggatcaataataccaaccaatgtccatattcaaaaatattatgtaataactggaaaacgcgtcacgaaaattcactgtcgacaactttttaagcattaattcttgtgtgtattaatctaagtccttcctacttcttttactgattaatgattatttaaacaaaagaggtatatataactacacagcaaatttaaacatacgaaactgttgtttagtttcaaacctaaacacattattgaaatcaggatgtttatatgcaatgatattatcgtattctttaagaacatgaataccaaacagttcaacactattatccaacttcatccactcaaattctgcatcagattcaagcattttagaatatagaacaaattccaatttttctgaataagcctttatccaatcgtgctcaatatttactctttgaaatttcattaacaatttagaacaattgttcacctcaacatggataagtctttcaactttaacatattgccatgagttacctatcttgaatttggcatatcttgttgcaccttttttgctaatgaatgtattacgagagcaaatatgtctctgttctctcaaaacaactacatccttttcagaaatttcaccatttgcatataattctgaaagaggcatttccaaatcactatcccttggaatctttccacaccttggaatatgataacaactcattggatcattcttatattcataaatggatttgcaattatcaactgctaagaaagccgtttgattttgagtagttttgaaactgtttctatgaggactaactttttgtctgactgtgcaacagcatctttcagtaaaaaaacaccaacgatctctaaaatatccaacagatttccatatatcgaataaatgaatcatttgatgggtaggtacactaaaaaacttactaaaaattggcttatattcaggaatttcaaatagtcgttacaactttaaaatcaattttatgtaacttcttttcatctcatttcttccattattatcaacaaaagacaatgggacattagtagccaccaaagcaataacatatgcattcaactcgatcatacttttaactaaaaactgaaaaggagtaagtggataaatatcattgagttcttcagcaagtggcagaaagtacaatggaaaaatatgggaaaaagcctttacatcaacagctttaactctactactagtcatctcttttgttaaatagattttaatatcctttggtttctcaatgaattttacagtccccaaataatcatcaatttcttttttatgttcaataatttgattataagagaccaaatctggcgccttaaatacagcagaaacaaatatacttaccactcttttagttatgaaattttcatatgccgtatgcatcaaatttgaacaggcaatttataataatatcagcaaagaataattataattttatttttatagtaattttttctccattttatataaacttgaaacctttaataaaggacaacaaatagatattttgaacatctacagaataagatatcgatctgagttgtacctagttcataccgatcatgatccttaacaaaaccaaaggaacctattgattaatgataaaacttacctaatcaatagacgcgaccaataaagatgtaaaatgtaaaattggaaaaaaatggacgaataattttcaattttcctacatctatttctatttcagttaaaattttgtgactgtctttttttgtttttctgggatcttccttttggggtttatcttcggagtacaactacaagtccgatagataaggtaagttagttgatcatttactttagttacaatggtggattctcctttgtcttcatttcctgaagaaactggatcgaatcatgataccaatgttgaaaataatgttgttcaaaacattgataataataatgtaaacactgatgtaaacaataataatgataataataataacgatgatgatgacgatgatgatatacatcaagatgcagttctaaacctagctagtagtattgtcgagtctctttataataataccaacaatgatgaaaatgtgattgataatggtgatagtaatatgcaaattgattatgataataacgataagattgattcaaatatagatgattcaaatataaatcattcaaatattgaaactatggaagttcctaaaactaaagatgtaaatgaagatcaagaagatgatgacgaatttgatagagaagaattgattaaaaacttagtaggtaatgccgttcaatcattagaagatcaaagtaatactagtaatttacactacgaggaagatgataattacgatgatgatggaccagatcacaatgctcaaactgagcaagatgataatgtagttgcggggaataatgataatgatagtgataaagaaattatgggcgatgagcttgaaaatgcaattgcagatgtttttaaaaatcaattttcatttggtgataatcttgatgataataataacaatgagagtgctaataatgatgacgatgatactaatgtcaatcttgatgctaacgatgataatcttgaaaaaatcgataaacaggattctcaattgattaatcctgaattatctgttcaaagtgaaagaataacaaatgataacttaattggtgacaatgaattagataccaacacaaatattaacgatgaacttgcagatgcgatcaatgatgctttagtaggaaccagagaacaaattgaaaactataatgtgagtgagaatgttgaagaaaataaagaagatactaacaaacagaatgaagaagagtccaaagatcaaaatatcgatgaagatgtatcatctgatgaagtattggatttaaaaagtgcgattgaagatgctttgaaagatacaagatcggtacttgaacaaaaagaaaaggaaataaatgatgaacaaattgaattatttgataattcctcaaatgataaagaagataattacaataattttttcagtgatatgaaaagtttagtttcagaagctgtattacaaagtgaaaaggaaaatgtaatgaaggaatcaacaaatttaaatgaacaagaattaactgatgttattcgtgatattgatttgaatgatgttatggctactgcattgaatgaatcttcatcaaaatataatgataccaattttgaattagatagtgctattaaagaagctctttcattagttcctagtgtgaaaaataagaaaacaacaaaatcaactaaatctaaaaaagctcccaaattttctgaatcaaattcacttaaaacatctaaaactagtaatgaaactacttctgaattagctagtgctatcagtgatgctttgaaagaaacaagtttggctggatctgataataatgctgccccttcaataaatgaacaaattgactttgagaaagctttaaatgatgttgttaatgacgtcgtctctaataaccttttccaagatcagttttcgaatcaatttttagaaagtaagacaaaggcaaaagataagaaatcaaagtcatctaaattaaaatccgcccaaaaatttaaaattaaaccaatatcatcaataccatcaatacctgttaataagagtcaacctaatagaaatgatttaattccaactaaaaaggttatcaaagaagttgaaactcagaaagagaaagaaactgattataattgggatgatattatgggaaatgcatttgaaatggctatgaaaaattcaactgatttagatttccaattagatgaaaatttggagtttcaacaatctgagtttaaggaaccatacaatagaaaacaagcggataattttaatcaattagaaaatatcaacatttatacaccaactgataaaagtgaaaaagcaaaagacaaagcagataagcttcatggaaagataacaaagaaaacattgataccaactagtaaaattggcgattccaatgaattatctcaagatgatttgagcgaaacaaaggatgaagaatctagtgatcaaagttatctgaaatcatctgttattgatacagtaagtacattatttgatacaattgatctatcatcattagatatccatagtcttaataaattaagaacttcacagttagatatgataaagaggactgtggcatctagtatttcatctttaatgcataatgataataattcaactaaaacagtcacaccaaaacctgatatggatgagaaggaaaggattagatttgagaacagagaacgtaagaaaagatggagagagtttaatatagaaagaaatagagatatagatttaagaactagagttatcaaaagggccaatttactttatccaaatcctgaacatgaaacattaaaggaacaatggatagctattgagtttgataaaagaaaacaaaaaagactgaagaaacaacaaaaggtcaatttaaattttactgatatgaatagttttaatgaaaaagatttagttccatttgataaatttttcaataatagggataattttaagcgtatttctgcaatatataatgaaatgggtggtaatatccaacctgagaaattagaatcttcaaatgctgataaaagtattgtcattacatcaatcacatctgtagttattgcggtatatatgcttacaatggataaaaagattagaaataatcctgaattttcgactgaaattcatcctatcattcagtcctttacgtttttgcttgataaatatttatcgtctcctgaaaggcgtaaaactagtgctaatttattaatctatgaaagtagatcatcttccaatcaaattgataaaccaactttgaatgaagcaaccaatcaatttgagaatgatactgttgaatataatatagatgttccaagtacagatacaccaatagaagcatcaccaaaagaaataagtgttgaggaaactaataaaatatcaaatacagaagaattaagtaatatagaacctgcacttaaggaaattgacaattctagacctattaaatcaaagaaacaagataaagctgaaccacaagttattgatactcaaccctcaaaaattgcaccatcgagtggtggtgttttattcaaagttcaatcgcaaaatccaggaaataataatgttactgctccttcatattcagttgatgttaatttaagtaaacttattaaggataaaagtgtaccgattgataataaaaccaaacataatgaaatgcgtgggcatttcagtattaatgaagcaccaaattttagagtttctaaatctttgaaaaagaaagagaagaaaccaaagaggaagcaaccagcacctgttattaatatagaacaatttctgtcacctcaaccacctccgccttcattattacaaaaaagaaagatctctgaagtttccgataataatgttgtcgaaatagatgttcctgaacctaagaaatccaaaattatacaatttacacaggaaattgtttcaaaaccagttgaacagacacctattgttgatcgtactatcattagaaatacaaataataataaagtaaatgttactgagtctgtgattccaaagaaaaaagataatgattttgttatggtaactaaagatgatttgagcaaggatgaaaataagagattggttaaagatgtcaaggtaagaacaaagagagcaccgattgttaataggaaacctgaaattgctaaaattccattacctaaatatggtatgccaaatattaataaacctgtcatcaaggcaccaatttcattgaaaaaggcaatggagaaacctacagatattagacctgttagtaatattggaactggattacagcgtccaggagcatttaggagaccaggagcatttagaaaacctgaatcatcttcaggtgttgggaatatccctaaaccgggtatcattcctaaacctggtttaattccaagcataaagaaagtctgaactttttaagtatattagagaacctgtatattactattgtatttacccgtgtgtaaatatataccaacgaatataaacgtaaatatatgaacctatttgtaaatttttcaaatattattaacattaccttcagttcaaaggacctggtgctggaaacggggctcagcgactacatgtaaggtatatactaaactgagtttcaatggtatagcttcaaagcaatcagcattagataagccttgattaaagttgatcaacaaagacataaataaaccctttgcatttatgcatttggggtgacctgttcagccgggcgtggtattgatagaaggtcaaggaaacgactttcccatagtgaaggagtttagaaaaaaataattatgtcaacatctcaaacttttttgcttacggtaataatttacactgaataattgctgttattactggtaactgcactgctttaacccaattcaacaacagcattgaacttcggatattgttcgtcttgttttaggataggcaacaaactttcaaataaaaatttaactagaagagaagttcagctttgttaaaggagtaagattttggcacctcccaaatttttttagtatctttacagaactaaccaatacatgtcaaaatatacacatcccattgacttaagattgaataatttttaaatataaatatgccaacagataagaaaaatagtaaggcttcaagtgaattgccaaaagactctgcacatatacaagctacgcccgctatgatgagtgttgttgaggaacaatgtgacgatgatagtagtgtccttcatctttcacaagttccagcagatactccacttaacaatattgctgatgacaaagtactactagttccgttaaataatcacacaactgcagtgaaaagtatcacacagaaacttgatgattctgataaggaaaatttacttgaactacaagctcaaactcaagcacaaactcaagctcagccacagaagttaatgaatagtatccctttcatagttgaagaatcaaaaactccctctttgaacttaaatttatcagaaaggattgattcgattaataagaaattactagatcctgttgctgttactaataaaaatatcaatgaaatgaaattgaagaaggcaacaaatccaagtatatccagtttgaggacaatttctttacaaggaaataatcatggaactgtatcatcaacaagtactacattgaccaaagattcatcgagagctgaatatttttatactaaagttcatgatgcaatgaaaaatgatactaatcaaaataaccatgcaactgaaaattttgtttatggtttaaacacatcaacaccattatccgaacaaccatctgacgctgcaaatatagagaactctatagcatctaaagacacaaaaaagaataaattgtataatacagtggatagtactcataatagagaaaataccggtaccattgacacaaccaaagcaaaagaaaaactacaaaatgttttcaattttgaacctgaatcacctacttctaagaaaataatagatgaaacttttgatgttaaatcacgttcttctctgggatcaaggaaaagttccaagaaaagatctatgagaaatttcagtgatatcccagaaatacaaccaatgagcaaaattgataatgatgataaatcagtgaataaattaagacagataacgtcaagattgtttgagtgtaaaagcaatcaaccacgtcgatactcatccattaatgatgattatacaaatactgattcttttgaagaggatttagaatattacgagccaagtctaacacatatggtttataataatgatacactaataccaaatggtaatagttatgaagataatgaatataataatcatccaaataatagaaatagttatgatcctttatacaatggtcaaaatcataatactaacaacaatgatcattttgatgatggtgaactacaaagttttttctcgatgaattataatgataactcagtgaattctcaaaaacatgattatcatggtaaacctaatcataatgtattaaatgttcaagattatggtagtattcctggtgataaaagaaaaatggtttggaagagatcggatatttatagctcaccacatgactttacaccacatcgtgtgaaacgactcagaacaattaagaatatatgctattctgctagtatcataatactgatgttacttataggtttcatatcaggatttgtgttagcaacaaatacagaattacaagatttagaagttgttgatgtaaataatatgttagtgagccaagaagaaattgtgtttgatatggtttttagtgcattcaatcctggtctgatatcaattactgttgataatacacaacttgatatatttgctaaaacgcaatatgtttattcaagcgatggaccagaaggtcaatatgaaacaattttattgggatcgattgaaacattagatatcccgctttattttcaagggggtttcttaaatcgtagaaaagatgatagtacaactcaattaaaaattataaatccatgttccaataaaggtaatgatgatgatgatgatgatgatgatgagaatgatggtggtgatggtggtgatcataatggcgatgatgacaatgataaaaagaagaagaaaaagaaaggtaatggtaatggtaaaagtgaaagtgaaagtaaatcaaaagataaacatgaagagttagttaataatagctttggaaaattttctccaccagatgaaagatggctgaatatttcaagacatcctttcgatttgattattcgtggtgtgatgatgtatagattgccattttcatcagaaaaccacacaatttccataagctatacagcttatgttgatccaagagatgatttaatagtataatagtgtataatagatttttataatttggtaatgtataaaacaaaataaaatagaacaaaataaattaaaataaaaaattataaatgtaaacaaataaactggtgataatgattataaataaaggagaaatgtagataaaaataaaaatgattaaaataaatagtgacggaatgaaataaagaaataaatgttatactataactaaacgaaagtaaagtaattatacttgattagaatgaccagaataactacctgcaactatagttttcaaagttggaacatctgaccaatcatcaacttgtttactaagaccatcaccaaatggatcttcaacaactgtttcacctcttgcttgaatttctaaatcagtatttatgaaatcaattctacctgcaccatcttcattggagatattaaatttaatttgaacacctgaatcactttcctttgctaatttagttgtcttaaatcttgcaatgaaacgttcttctttctttgttgaattaaatgtaattggatctttaacaatccatgtaactctacccttttctttatttaatgaaccaggtggtttagttgcagctgatgaaacaagtgcatctttaattgaaacagaaactataaaattagttaatgttaatgaacctgttgttaaatattcatcaagttcatttgttggtttaattgaaatacatacagttgattgattagcttcatgtttccaaactggtgttacaataattggaggtttggtatcatttaacatatatttcaatgcaccaacagttctcattgaaatttgtgtcggatcactaattataaatgtatcttcattaacttgattcattaataatgtattaacagcaaaatttggtaatttaacattttcatttttggaggaaacttttaatgaaagttcagagggtaattttttttcatcatttgaaatgaatgaaaatgcaacttcaccaattgcatttgatctagttaataaaccatctttaaaggttgcattaaataattcaacaattgatgcattaaaacctgcagttgttaatgatggatgaataattgcaccactaactaatccaccaccaccagttgtatttctttgtaattcactgttaactgattcagatcgttgagtaccagttggagcaggttgtaaaggttgttgttcaattaacatactcttacgttgcgttggaggaacaggaactgaatttcttggttgtcttaaattagaaactgatgaaggagctggaacagatggatcagttgaaacgtgttttcttgatgatggtggtggaggagcaggtgcattattgttattacttaattgtgatgcttcaggaataatattcatattatatgcagttggcggaattgatgtaacacctgtagttgatgaagctggtggtgtatttaatgtactatttgaaactgataaattatcaacttgaggaactgatgaaccagataatgaatcagatcttctagttggacgcattggttcataaaatgatggttcaacttgtttttgttcaataattggtagttgttcagcttgctgtggttgctcaacaggaacaaaggttgaaacaacagctggatttggtgctgaagcttgttgttgttgttgttcaattgattttggttcttcggtatgaacagtttctgagagtggatattgaggtaatggtttgttaacaggttcagcaattgaagattgtctgtaaggatgttgattttgaggttcatcttttggaacatttggtggagcaacattagcattattattgtaatcattgtgattattgatactattatgaatattattgttactactgtaatgtttaacagaagctaaagattgtgaagcaattgattgatttctttgtctattactagaataatcacgaggattagttacttctgtattaattgaagaattatcaggttcatgaatagttgaaggaggagtaaaatcagttggtgttgaatctttaccatttttcttacgacctttaaaaattgaaccaaattttgaacgcattgcacctttttctttctttttattatcattgaaagttgatgaagtatttgatgataacattgaagtatttgatgataaacgtttactttcattagttgaaatattagatgatgaaggtgaatcatgatcattatttttctttaaatggaaacgatgagatgataataaacttgaatgacgttttgagacagcagcacctgcaattgcaccaccaacacctgcaccaattgcagcaccattagatggtgaagaagtaaacccatcagttgtgtttcttgattttgatactgcttcaactttaatattttcaacaggtaagttagttttaattacatcatttgcaaatctattaatttcatcatcaacgttaaaatttaaaacgtgttgtaaaccattttcattatcctttttaaattgattaacaacatcagcaacatcagtttgatatttaaggaaaacatcttttaataataataatctttgataatcataattttcaaaaatttcaaaaaaataaggtgcctttgttgaccattcattttcaaaatcatttaaattaccatgaccattttgaccatttttcagatttgaagcaatttcaatcaattgatccatttcaattaaatttaaatcattatttctagtaaataatcttaatggagcaatcatatctctacccatttttctagtactttgatcaaataattcaatttcattattaattatttttaaagtatcattccaaatcggatttaataaacctaatgcatctaattttgaattttgtaaattaacattttcatttgtaaataattcttgaccagttttatgaattttctttaattcatcaacataatgtaattttaatctaccataagaagttaaccattcagataattctttattaatttgctttgcttgttgacgtctaataactaatgattccattgcttcaattggttgtttttcaaacaatattgatgaagaataaaccacatgttgtgattcctcgttagattcagacatttttgttgtttgattaacagagattgatggttaattaagatttattcaaagtcttaaaatgattactaaaatcatgcaaactataagtaatgcataaaacaaattataaactcatccgaggactcgaaaattacttattaagatgcagcaatgtatggatacttcctaatggggaaagtgaagcgaaaatacaagttctattaagacaattacacaagattacacattatattaaagcattaaaacattaaaacattaacttaactgaagatttcctttgataacaatggtaaaaggacaaaacaagcagttgttaaagcttgaatattttcccaaattgctaatgggaatttccaaaatcctctatcaataaaatttaaataacatgaataaaatgcaactgaaaagaaatgattaaataatgttaaagaacttggacataaacctgataataaactaattggaccattaacacattcaccaccacgtaagaaataatagaaacatccacgttgtaaaattgttaaagcactagaatctgctgcaaataatgtatataaagcaattgataaagtatttataacaacatctaaacctttcctttcattatgaaattttttcatacaatcgaaaactaatgaatgatcctttaattcatcatttgataaagttgataaaatttcacacattaaagcacaatcatttaaaccaacagtcataccaccaccagttaatggatgtctcatatttaatgaatcacctaaacatataaaaccgggtttatcatttaaacgagctgttaaaaattgatttggcattgctttataaatatttgaaccatcaaaagattcttcataagatttttggaaacttggtttaatttcatttggtaaatttgataaaacttcatttgataaataatttaaaacatcattacgttttggtaaagtatttgatctataagcacataaaattcttgaatgatgaggactaatttgataaataagtacaggagcatgattacctaaaataacatgaccatgatattttgcaggtaaatttgcatcaactaaatctaaaccaataaaatatgaaccaattgaaggtatataatcttttgataattcttttctaaattttgaataaataccatcacatgagaaaactaatgatgcattaaatatacctttatcagcaacttcaatacctgtaactctaccatttttttctataattttagttacattaccatctaatttagtaacatttggttcatttaaacaaattgaacgtaaattcattaagaaatcaccatgatgtaatgcaacacctctaacaaaaggagatttttcccaatcatccatattaagagtttcatcagtaattaatttatcacttgataatttatttgaagttaaagcaccaggtactggattaatattaattttatttttcattaaaattgatttttcaggataattgatttttaaatttttatcaaagaatgaaatataataaccaactgtttgaattgcattaatattattaacagcttgagccatacctaatcttttaagagctaataaaccagaaggttgcattaattcaccaacaattctattaggtttagaccattctctttcaactattaaaactttacgaccttgacctgctaaaactttagctaaacagggaccaacgacccctgcaccaataactatagcatcataatgttcctcggtggacatgaatattcttgtagtgttaatctagtcaaatagatatgtaataaagagaagataataaggaagagattgcagagtttaaatacttttcatcaagtgaatatgtaataatagtaataataataataataatagtaataaatggcgtgttcatcgtagcgctcgtatagtaatataattaggattattatgtcatacaattcaaatttcgcgaaacttgtttttcttcacttttttttttctttcataataacatctcttattattagtgtcttactctcttccgttgattgagtataggacattggacactggacaatgtggaatgtatggttatggttatgtatttattatattagtatggtagaaggtaatgcagaagttagttggatactcagattgaataactgttcttggaataccccttatgatcaaaattcactacattttagaaaagatattcaaataccatccataatagatttaccatggaaacaagatgatttaccatgtggaattttcgcaattattgcatcttggactgcaattgatgcagtttccgttgatatagatgatactactataacaagttatacaagatggagtgtacgtaagagaagaagtagatgatgatactaataataaggctcttgttgatgtacgtgtactggatactctatggtttataagatgagccttaaacaaaataaaataaataaaataaaataaataatttcctcgcttcactgtgagagaaaaaaaacttttttttcaacaattttttagtatgaggctgtgtgcagtgatagtcaattatatcagaacaatatatttatatctcattgaatctcttcttatctctatttgtacccctgcactgccccaatgtcaaacgatcatgcaaactactttctacatgaaaaatcaaatattattgatacttcaaataataatataacctctaatactaatactaatactaatactaatactaatactaatactaatacaactatccccaataacattaataataacaatgacatgactattaataataataataataatataataataatatcaataataatatcaataataatatcaataatatcaataataatattaacaaacaagataataatggtacccacaataattcttcaaatataccctcaacattacccgctttaccattacaatggcctggaaatgatacatctcaattacttactcaattatttcaattcaatagcttagcaaatcaaaattcaaatcaaaatctaagtataaatccaaatcaaaatcaaaactcaactattaatataagtggtgttgaaataccttcaaatcgtttattacctcctcattcagataatttaatggatatacctcaatttcatataccttatcaaaattcaatactgaacagacataatgttcaaaatattataatttcaccaccatcttcatcttcaacagtctcatgaaaactctttatcaaattcaatatcaaatttaaattcaaacataaattcaaatataaattcaaacataagttcacttataaattcttcaccaaattcacatatacaacatcatcataatcatcaacttcagcagcaacaacatccaccaatacttgaaattaagaaaaaatttatatgtacattcccaggttgtggataaatcattttcacgtaaacttaattatacatcacattataattcatctcatgaacataaaaaaccatttcaaatgtgaaatttgtaattcattctttgcaagacatagtgatcgtagaagacatgaaaaaagtcaacatttaaataataataattggtttatttgtagtgggaaattcgaaaataaagattatggttgtggtaggaaatttaaacgtcgtgatggtttaacagctcattggaaaagtcttaaatctgaaaagaaatgcttccaaggtattaatcgtgatgctttaaaggttttacaggaagatatacttaaaagttatataccaaattctaattagttacgtaattattagcataaaatttgtgtaaagatattaaaacatttatggcagtcttagtttatttatagatcatcattacatgtcattttatttcctgtcttttcaataaacattaaacaatggtatctctacatttcacagctatattatcactattatcattagtaaatgcatcaaaatttcagccatatcctaatctcggaattagatcctcaatcttataaaacataccaaactggtgatgaaattaatttacaatgtataaatagacaaattgataatggtgagcatattttcaatgaagaaggtgaaattgtttattcaccaatttttaaatgtttagaaactaataaacctttctcatttaattataatattgatagtttaaaaaaatgtacagttaaatttgatgatgaaattttccatttatttcaattatatttacataaagatgctccatttacttgtaaatttgaattacgtccaaattcaggtatttatattccattagattttagttttagaggtaatgttttagaatctcattttgatattgatccaaatattaatttattaatgttacattcaaatgaaaatgaattaattgcaggtactgcattctcatcttcattaaatacaactaaagttataattggtcaaaatgtaggaatttaattttaatattaaatggccaattgcaaataatcatataattaattctgaaaataatattcaagcttattatgttgcttcaacaaattctaaaattacttggattttcggtattgcaggtattttcttaggtatagtattaactttaatattctcctataaatcaataaataaaaaagtccaattaagtacatggaataaagttgaatagttagttttttattctatacgatatatatacatatacgattttctttatttataaatctaaaagaaaatgaataaacaatatcttcattataatttctttaataataattgtaaaagtgattgagtttcaccttgactgtaaattaaatatttatcatttaaatatttaacataactttcccttaccttttccttaattttatcatctatttttacctttgatttccatgattgatataatttaacattttcttgaagtttattaataaattcatcatcatcaattgaaacatatcttaatgataatgttaattttaataacaatacattaatatcattttcaaatcttttatttaaatcatcaataatataatcacacatatgaattctatctaaaatatcaaatttatcaattaatgataatattttatttgataatttcattatcaatttgtatttttcatcattaatttcattatctttaatattaatttgatcattatgttgatattctttttcaagattttttatcattgtttcaatgaatacattatataatgtcataattaaatcaccacgtaaaactggattatcttcaatactacctaatgttgaaacattcatttcaggtaatgcatttaattcactatttatttcatcatcaccaacatttaatgtaacaatgtcttcaacatcgatatcatcatcatttttagtaccttcttttttactttcattctctaaatcttcaatttgtgaacgttcactaactaattgtaataatttccttctagttaataatttagataagtaatttaattcgaatttaataaattcaatccaaactctttcttcattaagattaaatcttaaacatctcttaaataatgctcttgcacctttaacatttttattatattcatattcccattttgcaccacttaaccaaacatcaatatttcttggttgtaatgataataatttagaataaatatcataaacaactttaacactttcttgctttcttgcaaattttaaataatttgcccataattccatatcacttggaaatttatttgttgcttttttgaaaataattaaaattcctttgagaaattgaccaattactaatacttggagtcatatcaatatgatcctttaatctttgaattcttttctttcttaatttatcaagtgttttctcaaatttaatgtataataaataatcttttggttttgatccacgacctgaaattctatgttcaaaatcagttctacgacgaacaatcatattaatttcttttctttgaaataatccacgtttctctaaatcttccaattcaggtatagatttttctaatgcatatctagctttatctgacatgtttttttggtgattgtagaaagaaaagttgtaaaataataatactgtaaatatttcaagaaaaaaaaaattttataaaattcatgcaaatctcgattcatgttgaaaaattattacttaatccccttatacttagaaaatttaataatattgataagagtttaacacataatcgtttctttaattataaatataaaataatatacaaaatattaattagacttgctaattaatttacactacaccaattttgatctgcaaaataatcacaaattttagaaattttattatcatcaagtttaatagattcagttaatctatctctctctaatttaccattattaattaaaatttcctttaaataaaacttcctttatgcaaatataagccttggggaaaatttttaaatcttgacaaagttctttctcagaatctgataataaatgataatcaggagattttgaaatatctaattgatctaatgataaagttaattttttctttgtctttgaatcaactggagttgacattcttgaatttgatttaactgaatttaatgtatgtctttcctttgttattgaactcaaatttgaattcattattaaatctgatttacttgatgaataattattattgagattactatgaatactatgattaccatttgaaattgaatttaagttattagcatttttaagtttttcacgttcaaaattttcaccatcttcaattgttaaaataccattctctctccacttcctttaattgtttaattctatttttcaatttaaattctaattcaatatcatttgaaaaattttgaaaatcctcagatgacattattcttgcaaaaggtttaattttattcattaaatctctttcatcttttgatcttttcttatcaattgcattattatttttataatctaataaattatcatcaatcattaatcttttcctttcaggctcttaaagttaatttttcattataaatatgtaaaattaataattttaattccaatatcttcaaatgattcatcaggatcaaaaatcatatcttgtataactttttcagcatcatcatcaaattcttcttcaaattctaatctaccaggcatatatttttgaatataagaacataaaggttgagaagttaaaacttttttcggaggtggtaaaggtaatttctttcttgcatcaaatctttctttacgtttatttaaaaattcattgattgaaaaattagggaaattttcatttaaatcaggtaatggataataaggagaatttaaataataattattataatgattttcaacttcttcttttgatctaccttcaataaaatctgcaatatcttgccaattacctaaacctaaattttgacaaccttcaattaataataattcttcatcagcaccccaatcttcatcaaaaattggatattgatgttgttcaattactctataattatgaaatggtttatgtttaccagatgatttaccatttgcaaagcaaggtacacaaagatcataatcttgacattcagcacaacttatacgtacacgtctagtacaatcagatgaacaaacatcacaatgaaattgtcccattatatgaaatctataatattttcaacaaaaagtccgaaattttttccccggagaaggttttcaaaaaaaaagaattttaattggcaaaaaacagaaaatatggaaattcaaaaaattgaatgtataataacaaagggtatattatcaatgggtaatatacttatatactatatagaatataataaaaagtataatagtaattggaataatattattaataataatatattaactaaataagataagccgtaaagtatatagagataccccctatagttcacccacttaaacagttcaattgataataccataataataataatttaagaaatggatgagctgttaaatttttagaattttaatctctcttaaataaatatgtcacgtgtgtggtataagggttattagggttatgttttagataaatttccaaaaagaaaaaattacgtttacaaatagacgcacttatttgaaaaaaagtttactcccatatacaaaataacagtcacaaataatgaaaataattttttcagtttttccaaagagtgcgtatagagattaatttacagttagtgaaaaatatcaataatgtagtaataatagtaatatcaatttctttggatttacttgaatttatttttgaaatttttttaattgtcttattgaacaaccacttttaatcaacttttcaatatggtacgtaacgacatataatatatcaataatgaatctaattgttaaaagacatctatatcccctatttccctaataccacccatgttatagtcaattattaaacaatttacgtaatgaaatgacaaatatccaataaagttattaaaatatctaataaatcaactctaattataatatcaataatgaaatataactaataattatatactgatatcatcattataatataaaaaaatcatattaagatattattaagatataagggggatataatgttataaacatctttctttaagaaacaatatactaacattataatttaatatcataactttttaatttattacagggtagagttagaacaaagactgttaagagagctgcaaaagttttaattgaaaaatactatccaaaattaactttagattttgaaactaacaaaagattaacttctgaaattgcagaaattcaatcaaagagacttagaaacaagattgctggttacactactcatttaatgaaaagaattcaaaaaggtccagttagaggtatctctttcaaattacaagaagaagaaagagaaagaaaggatcaatatgttccaaaggtttctgctttagatttagaaaagaacaatggtgctttatatgttgatgcagatactgatgctatgattaaatctttaggtttcaaagttgaaacttccgtctcaaatgttaacggtggtgcaagaagattcagaaagtaattatcgtaaaaattttaatattataatataataacttaacataatattttatataaaattttctatttccattactctgttttaaaaaaaattaaaatgatatattaattaatttaatcctattttcaatagcaaagataaaagtagtatctttcttaatactctttattcaatctcttcaacaattttttcacaatattcttttaatattttcgatcttttatttaattcattactgaattcctctaaatttaatgcaaattcagtctaaattatcccttaataacttaattcttttatcatatttaattctagcaattataagttcatccattaattctttatattcttttgcaaaattttctggttgttcactccattgattgaaattataatgtacaaattcgaaaaattgtttctcattatcatctaattcctctgttttatcctttttaccaattatatcataataatcattctcttcacctttcatatattcataaattggtttatcattaataatatatttaattggagtttgtggccttttattttcattatcaacattaagatcatcaatttcctcttcttcttcatttgatccattagtagcttccattgaattaacgctaacttctctatcaatttcttccttttcagtactaagtttaatctttttcactaattctttatttctacaatcattaccttctctatcccttttcaattttaaatttctttcaacgcatggtgatgaaagaaaactactattttcatcacttgaatatctcaattgcaaactgatattctcctttaatttcttttccttatcaattattttcttattccccttttcctttaatgatcccttaatatctaaatcattaaatggacttgagatattaacgctctttttagtattttgattaatttcatagttatttatttctgggatttccatcataaattctaatatcttattcttatcatttgattttaatttggtactattgctattatcagacttgctatccttttctctttccttctcttcgacgttacctttcttcaccaatgacttcttatctttaccattattaatattattattattaacatttaaattagttttatcacgcaatacactcttattattatctgattttttcaagttttacttgaatatccttattattcaataaaccatcactaccgtttttacttttaacattactattattactactaatagttattactattattgttattattatgactgttttcgtcacgttctttctttacaatcacggtaggtttattcatcttacctttttaagtgaaaactaccaatgaataatataccacaaatgaagttaataaaatttgccgtgcaaaagatcatatgatgatgtcaaaaaaaattaaatgagccgccccgttctcaatctctcttattaaattcggggttagatttaataattctgaaatactctttgttaggtactcaatataaaagatgcattttactatggtgcagctcagccgtttcctccgtcgtgccctggttaaaatgcacatctcgccgagcacctactaatttcccctatttactatacagccttcatataatgagcctttccttcaacttcaataattttcacggacctttttacgagattcaaactcggagtttatgtatgcatattttacaaattcgagttttaatttaacttacatacaatgcaaaaaattaacgtcatccttataatttactcaaactatatatgatatacgagatattgaataagtaattttacaaaataaatatttcactattaataactattgtcttttaaccatttagaaacatcatcaccatctctttcaatccagtttgctttactcttgataatttctaaagattgagctaaacctttatcaaaaccttttgtatctttggtcttgaaaaattcttcaacttccttatattgttccattttagtaaaaccggttgttgaaacttgaacaattgaacctaacatacttaaacctggaggtaataatttaaatagttcatcccaattagatttcaaccatgagaataaaatttcaataccaattttattacttctcataccttgcattggtatatacatatcttgtaatctaattgtaccatctaataaaaatttcaatactttatttaaaatatcagtattggtaaatttaccaaatgatcttaatgcaataattttttcatccattgattgtgggtttttataaatacttaataattcttcaaattccttttcaccacctgttttagcaactgtattgaaaatacatgcttttaaatttggattaatactttctttatcacctttaacatatttagcaaatgattctttgatatatgagataatattttcatccccagattctgcgcatgctgcaaataataatgcctttaatctttgatctaagaatgaatcatcttccttaaattcccatcctaattcataacatttttccttaactaaatcatttaataatttagttaatgatgatttaattttttcatcttcaaaaatccatgcagatttaatgttgtaaactctagttaaaatttcatcccagacaaagaatgattcttcagttgatttccatttaataactaatgataataaattacttgttttagtataacctgaaactgataatgcaccaacatcagaaactaaaccaattctatcttcaactgataaatattcagattgagaaccgaatttaacccatctttcatcatcatagttaactctacaaactgcattagaatcaccattaattttgaagaatgatggatctttaatcaaatcagttaaatctaattctctttcctttaaaatagtatcattgatttgatctttttctgtttttaagttgaggaaaactggataaacagtttgatcatcttcatctttaacatcaccagtagttaaaaatctatgttgacaaattttaacatgtttaccagattcttcaacattgataattggataaccaactttattagtccaaacattcataattaatgcaacatcttcacctgaaacaaatgataatgattcccataatgcttctgtctttgcattaccatatgaatgtttctttaaatagtgagaaacacctttaataaaagtttcatcaccaagccaattagctaacattcttaaaacagaagaacctttttcataagaaattgcatcaaaaatttgattaatttcatcagctctcttaactggaacttcaattgggtgtgaagatcttaaaccatctaaacttaaagcagattgtaatgagtcaccaacaaaattttcccaaactttccaatctggataaaaatgattacaacatttccatgacataaaagttgcaaaactttcatttaaccaaagggaatcccaaaaatccattgtacaaatattaccaaaccattgatgagctaattcatgagcaacaacttcagaaactcttaatttggtacttaaatttgaatttttttcattaaataataaatcaaccattctataagtaactaaaccccaattttccattgcacctgcactaaaatcatgaataccaaccatatccatttttggtaatggataaggaatatcaaattgagtttcataatattcaagtgcttttgcagctaattcacatgaatatcttgcatcaacttcataacctggagttgtataaactctaattggaacatctctaaatttatattcagattcaatataagttaattcaccaacaatgaaagcaactaaataagttgacatataaggagttgtattaaaatgaacaatctttttatcatctttaatatcttcttcatttttaacatccatatttgacaagaaagttaaatgtttatcaccgataagagaaattgtgaattttgcttttaaatttggttcatcaaatgatgggaaagctcttctacaatcagttggttccatttgagttgttgctaaatatttagttttaccatcttgttcataagttgatctatagaaacctgccattttatcatttaattcaccaataaatttaatacaaagttgaattttatcagttttaaattcattttcaaatttaaaagtagttgtttgatcatcttcattagttgaaatatcaattggtttaattgtttcattattttcaatgatatgataatcaagtaattctaattctaatgtatgtaaagtaataaatgatgatttttcaacaacatctaaattaattaaaacttcaccattaaatttaaatgtgtcaaataatggttcaagggttaatttataatgttgtggtttaacattagtaggtaagatttgtctttctgacattactaattgattaattgattggtgataaaagaagaaagatgactctaacggggtagaaaaagttaaggtggcaaaataaatttgaatttattttataatcaaaattatgttggagccgtgccatatactggataagcaggataaataaaccgccggagctccgtaaattgtttgaatattcaatgaatttagttttacttttaattattaacaactatataacggtatatatggtaggatgagtatatgaatgagtatcaaatgctataaacatatgaagaaaactttaaccaattctttcgattaaatgaacacctgaatcagtttcaacaatatttgataaatcaccaatttgtaaagccattgcagctttctcaaacggaggttgcatttcacctttaccaaaataacctaaatcaccaccttttgaatgagaactacaatctgaattttctttagctaattcctctaatgttatatcacctctttcaatttcatctttataacttttaagtttttcaattgcactttcctttgtacgtgtaatttcttgttctttccaagaacttggtttacgtgattgattatgtttaataagtaaatgtctaactctaactttagttggaatatgtaacttttttgataaataatcatttagggcatccatatctgtacctgctggtggttcccattgactttcttcagtttgtttattaaaatagtattcatgattatgagtacgggaaattcttatagtccaatcatctggtaatccggttgacattgtttatcgttaaggagaagatgaattgttaaaaagctactgaagtttgatatatagttttaggtttgagatgacacattgcgtattgcacatggaggctagaaaaaaaattaaattttaaattattaagtaatattcctttactatggagtatatagcttgttctttcttcttttttcaatcgagaaacatgggagtttttaaggacacacctaaatcacactatgcatcaaaggaatcacgtcgacgtggattacaaaaaaccagattttactgtagtacatgtgaaagacaatgtcttgatcaacatggatatgatttacattgcaaatcagagactcatattattcgtttccgacgcgccgtccaggagaatggaggctcattaaataaattagttaataataaatcaaatgagtttcataaggagatgataagtacattaagacgtcatcatggatttaaatctgttaaactgaataatctatatcaggaacatatagctgttaaggggcatgttcatttaaatgctacacgatggccatcattgactgcatattcaagatttttagcacaatcaggagatgcaagagtttggaatgaaaatgatggtgatgatgatgatgatgacgagtatgatgaggatacattctcaccatctggtattacagttgcctatatgaaaaaggaaataaatgataataatgatagtaataataactctaaagaagtagaatacaaagatgaaactattgaaacggtgataatcaatagtgaaacacgcactactgacatcgacatcccagtgacacccacagtgaccctcccagtggaagacataaaagtcccacaaaaaccattagaagcgcgtcgtacactaaaatttgcccttaaaaagaagaaaacttaatagcgcgttgttgacattttcccctttgtgaacaaaatttaacacggttgacacgatataacccatttcaagccatttgaggccatttaaggtatattaattactattgtttctttattctcctttgtttacttgttaattatttacttatttaactgatatatttcgtattaacattcctaataaggacgtctaatagcttaattgtttactattatttgttattgtttgttattaaatcatatttttattataaactattccgtatcctgtatttccttgttttttcttatatacccataacttttaattatcatttgttatatatcacaaaagtttcatatattatactattatcacatagtcaaataatcacaacaatgtccgttatacaaacaccttctaaatcaaatgtttcattacctccactatcttccattttattaaataataataataatatcaatattaatatcaacaatacagttgataattcaatcaataatacatcctctgattctttttcaatattttctaaaacttatgatacttcattgaataatataacttcaactccaattttaacaaaatcaaaatctttcccttcaaatcatttaccaatgccaattcagttaccaaatttacattattctttacaaaatattcacactttaaataattcaaataaattaccacttttatctacatttaaagattctacattaccaaattttagtacaatctcaaattcaaattcaaattcaaattcatttaatgctccaataactcaatcaactccactgcgtaaatctttaccaattcttcatattaaaaaaattgatacaactgatattttcaatgatacaactaataataataatatcacaacaataagtcaatcagtatcggtatcagcaaatttatcatcatcaagtaaaacaacagcatcagtaactacaccaatatcaaccacatccacttcatccacttcatcaacttcatcagcttcatcaacttctctttcttcaactccaaaaaagaaaagaaatttagttgacgaaagtaaaagttttgcatttatttcacattcacagaaaactttcctttcaaatgaacctgatattgataatgcaagattagcaagacgtaaaagaagaagaacttcaccaattgaattatcaattttaaaagaagaatttaagaaaggtatgacaccaaataaacaacgtagaatttcaattgctgaaaaagttgatatgactgaaaaggcagttcaaatttggtttcaaaataagagacaatctttgagaaaatctcaaaatgtacttatgagtaataatagtgaaaattcaagtataagtacaagtataagtagcaataatagtgatacagatgatgaaaataaggaaaatgataatttaattgatgatgataaggataaggataaggatgatgaaaataaattttcaattataacaccaaataattcaattatacgtaaaccactgaatgatataacaaattcaagtttattacaaaattctccaacaagtcaaacattcaaatttaaatcaactgattttggtctgataaatcataattcctccaattcacgtaaacaaaagccaattatgaaattaaagatgaaaaaggaaataatttccaaataaattttcattataaagaacaaaacctaacctaatgctaagataatttcacttcgataccgttatattattattatattgtatactacaccatttatagaattttaaaactaatgataaatttatgattaaacatgttaatgattcaactacaggacatcagcacagtattacaataaataacattatttattttttttgagaaatttcttaactaatttattaaagttaacttatttaaagttagttagtaaacaattttattatataaagataaaaagtgaattaatttgtttaatattttttttggaatgaaaaacaatttaataaatccatcacaattaagcggatttaccctttctaccagtagttttagtatgttgacctctaactcttaaatgccaagagtgtcttaaacctctgtgagctctcattttctttaatctttctaaatcatctcttaatttagattctaagttatttgctaaaacgtggtgatctttaccatcaacaacatccttttgtctgtttaagaaccaacctggaactttatattgagttgggttttgcatgatagtaacaattctttctaattcttcttgagttaattcacctgctctctttgaaagatcaacatcagcttttttacaaactaaatttgcatatcttctaccaacacctctaatagtagttaatgcatacataaccttaattctaccatcaacattggtatttaacaaacgtaaaatgtgttggaatgaacctgattcgtggacaactaaacccatattgctcgtttgttataagatagaagtttaaatgaattaaattttaaaaatttctaattaaaatagattatatcaaatattatgataatggtaaatgaatgtaaaaaaattgaaaatattcaataaaatatttcaccaatattatgagaaattctactgtaatgaaatattcattatcactggggacagtccctccattaccctcgaatctttaattttttttccccagtgagaaatttcccttaagtgaggggatctctttttatggttcacttgtagagtgtggtgcgcgggtggttggcaatgttgtaatgaatcagccctcttgtgtgtcacgtgtgtttaagggtttttcagatttattttatctatgataatgataataatcatcaatacaatacgatagatataatttcattatttacatgattaataaactatatagatgatataaacataaatataatatactataaaaatactgtgaatagattattatactaaacaactctataaattaaggaatttagtatatttagttgccatataatcaaaagcatctttttcaataaatattctattagcctttaataaatgtctaacttcaacttcatctctttgtaaaacacgttaatttattacttggatatcttaaaattgattctcttaaatttgaaactttgaaataatcatttgcaataaataaaagatttaatttatcaaaattatgtgatttaataaattttttaattgctaatgattcagttgttacaatttctaaattaaatgaatcatttggtaataatttaattgaatttgcatctggattattattatctttaccaattataaataaattacctcttctaaatgcatcacttaatgcaattctataagcaaaatgataaactttatttggtaatttagttgaaaaatcatttggtgcagttctggctaatgcataagcacctctccatctaattggagaattcgcatcaccaactctagctctacctgtacctttttgtttaaataatttctttcttgaaaatttatgttcacttctaccgggtggacttgatgcaccaactcttttacaatctaattcttttgtaactgctaaccataaaatatctcttcttaacggtgcattgataaattcattgtgaattgcaaatattgaatgaggttctaatgatgggaatgatcttaaagtacctaaactataagaacgtggagttattgcatttgggagtatattttcattatttattaattctgattctgattgtaattgtgcttgtgattgtgattgtgaattctatagatgatgttgtagtagtagtattcaatgataacttagaagttgtgaaaaatcttattaaaggagatacctttatagatgaaactaaaggtgtacgcactagttgaaacatctatgtttggttgtaatgaacagatagatatatgacctacaggttatcatccaagcattccattgatagttattattcatgaaaaatcatgagaatggttgaaaaaaattgaaaaaaatctaaaaagtgaaagtcgcgtcgaaaaaaagtaaaataatatgatccagacgcgtctgtgttacgtaatagattctgggggtgtgtacttaatagaatttagtattcccctgagaacgtgccctatagtgataataatagagttgtattacattgcattgtttacttagtgtacgttatcaatgggttatattcattaatcaattgttgatgagtgattattggttaatattgattaggggctgagtgattttctaataaagaagttgttatcaccgatattcatttccttattctaggataagaaagtatattagatagaagtgaatagaagatctaagagcgggcataatcacttgttttagtttaatttaattttcaataccttttttttcatttgagacttttcattaataatttacttaatatatacattttagtctctcatatacacctaaacattgcaatagataccttatacaaatatactactcgtatatcagtctgatgttcattatatagaaataaatatccaaacttaaaagctaataattcaataattaaatcatgtcagatgatgatccaataaagccactttcaaggcgaaattctactattgaaaattcatcctcaataaaacgtaggaaatcatgtaataaataataataatatacctaattacaaataatacatcaaataaacaatataaaatactaccaagagaatatattaaatgtgaaaaaactgaacttataacaataatttcaagaatgttatcatcaattgttaaaattaatgattcaagaacttcattagatgttaaatatttaaataataaaaatttaaccagatttcattcaagatcatcaccacaaatttcaatttttaattatttattaagattatcagcattattcatcattagaaaattgtgttttaattgcaactgtttattatattgatttattaacaatgcaatatccttcatttgcattaaattcattaacagttcatagatttttattaactgcaacaacaattgcttcaaaggcattatgtgattcattttgttcaaataatcattatgcaaaagttggtggtgttaatataattgaattaaatttattagaagttgaatttttaaaatgggttaattatagagttgtaccaagagattataattatgattcaatttgtcaacgtaaaaattcaactggtaatattgaatttgatcttaataattctttacaatttggtatttcaaatgctcataaaattttagatttatattatgaaaaaatgataagtttatgtggtgggtttagtaataataataataataataacacaaacaataccccaaaagattttactaaaattggtcataatgatgaatttatttatacacttgaagaaacattaatattatcacgatattcatcatcatcttcaacaaattcatcatcttcaaatcctcaatcaccaataattaataatcaaagtgtggaaaatattaaaaatacatttaacaagttcaaataggaaattatcagagactgaatcttcaactacaaattcaagttcaactacacatacaactacaaatatacattctaataccatttccagttctaacacagattctcattccaattccaattcacattctaattctaattctaattctaatcattcacgaccctccatatcaaatacatcacctaaattcacagtgtccctaacatcttctttatataatacagcttaaattaaataaatagagtagatctttaattaatgtccccttttcccgctcatagcctataaattttttaaccccacacaattttccattttgacagaataatttgaatttcaagtatttgaagataagacaagaacgtttctttatgttatagtatgatgcaatactgcttcttataagcataaaaacaatgattgataagttggagaaaaactcttataaaaaagttgaagttttattaaatgaaactaatgataaattattcattggaccaaataacttacttaacaatgattcgattgaaaatattcaattattctctaaacttatatataaacaaaaagatattgaaaaattgaataatttcggacacgttaaccttacttgattcaactgatttaggtgataatccaatatcaaatcatttaattggaattttcacattaggtagaaatttaacatctcatgaacatataattcatggaggtgcaatagctgctataattgatgaattctttgttaaagttgcattaccacttactgaaaataattttgcagttacagcaaatttaaatattaaatatttaaagccaattaaaattgattcaaataatagaacaattgatgttttacttaattgttatattttaaataataaaaataatagaaaatttacagttgttggatcattattgaattccaatggtgttaaatattgtgctggtgaattacttgttgttgttccaagagagccactatagtaatgtattgggatacatgtattctcatgtccgtatatttcggagttttgtgtaatattgtagatcgtataataattataataatgataataattgtatattacgtaagtatctgtcaatttttttaggaattttccactgtagagggaaagagagggatttgagttatttgggcagttgatcagtaaacgggattgggaattaatttgatttttactttgaaataaggacaagtggtgatgttaagacaatgtttcaagttaattgattgtcgtactagtttatcattttcaaggatcggttataaacctataaggagtgttagaattgttaatcatttaagatgtttaacatttaaacagaattataactataataatagaattgaaaaatatgatcaatcaattatacgtaggtatagtacagaaccaaataaaaatgaaaaagtaatgaaaataatggaagcctacagaaaaagaaaagcttacctttacgattcatcaatagtataagtaatatatggatgagaattaaatggatacttattagatctaagagaccttttaatttagaggacataagtgcatttatttcatggttacttacaggtaatatagttttattattaattggtacaacaacatttgtttcattagttttaatgacaatgaatcaattaactgatcgtgattatgttgcagaattaatgggtaatttaattaccaaaaatactaatttaacagtttcatttgagagtgcaattttacctgattggaaatctggtacaattcaattaaaaaattgtaaatttagtagaaggccaaaagttattaaaattgttgaaaaaattgaaaagaatactcaaggtaaaattataaataaatcatttgaagaaatttatgatgatggtaattatacacaatttgatataacaattaaagaaattaatatatcattaagtttttggagatggattagtggtaaaggtatagttgatacaacatcaattaaatgtattagaggtataattgatagaactcatgttgtttggaaagaagatgatgatccaagaaattataaaaatatttataaaccaggtgattgggaaattgaaaaatatttagttgaagatgttttagttacaatttataatccaaatggttttagatcatgtattttatcaatttataatgcagatttagatattttcagaaaaaattggcttatgttagatattttaacatgtaatcatttaagtggatgttatgatggatcattatttacaattaataaaatttctaattttgataaatttcaagatgaattaaaaattgatttattagttaataaaaaattaggtagggaacaatttagtaaaattcaatttaatgaaaataattctcataaaagagttagatttaggatggataatttaaaaattgagcatttaaataaaggtatgacaggaccatttggatggattaatgatggtacagttgatattttagcagattttattattttagaagaaaatgttacattagatgttttattagatgaaagtattaataatttaagtaatcaatttttattatcaaaaaatgataagaacaaattaaatgatataaatgttaagaaaaattctgatgataataatattaataatcctaatcataatgaagatttattcatttgtgatttctatttaacattaaagaatccaaaggctaatataccattattcacaaatgatttatcatatatcaataatgcaacaattagaccaattgttggatatattaataataataaaacatttttaccaatacgtggtagaatttataaaaaattaagtgattttgatggttcatggacattttatgattcattactaatggatgatttatcaaaggcagtttatgaaagtttctatgaatatgcagctgatgaaaagttaaggaatgaaagattacgtaaagttgggttctggtcaatacagtttgtcctacagttcatcctctggagtatgacaacgttaggcggatagatactaaaaaaatgacgagcccccttcttttttattctcacacacacaataagagagaaaaatttatttttttccgcaattagaaagtgggccccattcacacgttgacggtgcttggctggcattgttctagttagaggttcccgatgcatgttaaatgcaagttctttgcgctttactggggctgaatgtattggaactagtaaagagaatatagatatgatgcagatacactaagtgacaattactgataaagaataagtagagtttccagtgaaatagaattactgtttatggaaagctgaaataatattatctcatcgtgatcataattatttaaaataattcattattttataataattggaaaaacaggtggtttcattaagcgtttcatttaattaagttttttttcaaagtgttttaaacatctcgtgtttggttttactgtcattccttataggtgattgcttttttttcatttcggttatcattaatccttttttaaaatttaaagttataatatagataaaattttttaccaatgacagatgatatttttaactacaatcaacaacttatgaataatgatataactactaatggataacagattaaacatgaataataccaataataatactaataataatgttaatgatcatgctaataatgataacggactcctttatccgaatgtgtcatcatatgaaaacgttcaacatcaaataccggtaggttatccaattaatcaacaatcagtgacagaaaatcaatcccatataattaatccaaatcctaaccttaatcctaatcctattacaaattctatatcaaattctatttcaaatgctatacctgttacagttacaaataaaaatacaaatataatacaaatataatacaatacaattacaaatacaaatacaaattcttatcgatatacaaaattaccaatggtatcgaattatatgcaaaatccaccaattcaacaaacaaataatataccacagagaacttcaagtacaataccaaataataattactcatattcaaagaatcaatatagtccaaatattcatagaccttcatctgcaccaacaggtgtcaattatccaacttatatgattactccaacttcagattcaataatatcaaataatcatccttcactaatttataatcaacctattgattttaatcaatcaattaatacagcaccatcattacctaaatacatacctagaaaaagttttacaagtgggaattttcattcaacacctgctgttccaacattatctaaaactaatggtaaatcaatcacttcacaatcaaaatcaaaagcaagatctatatcgataaattcatcgattgtaccatcattacataaaccaatatcaatgattgatcaaggtactaataggaaagttaaattagaatataataaagtaagtaaattaacatatgaaatttcacaaaatatgattataccaccatttaaaaatttaaagccaagttcaaaatcattaaaagttgagaaaccaaagagaagtaaacgtcgttccaaatttagtaaagaacaagatgaattaattgttaaattaaaggaagagaataaaagctgggttgagattgctgaaattgctaatgttgatagttatttagctgcaagaaatagatatcaagttttaattggacaacagggaggtggtgcaaatgaatgtggaccagatgaaattaatgtattaaaggaaattgttgatgatggagaaattgaaaagatgaaatatttaagtaaagaatttgccaaatgtactggtaaattatgttcttataagcaaatacgagaattattaagatatttattttggaaagatccaaataaatttgatgttcatgagaattacttgagtgaattacagagattacaaatggagagaatggaggagtttgcaattgaaggtgaatatgatgacaatcataatgatgatagtgtagataatagataatgtatagataatagataagtaagataagataggtagctaagataagataaacttcaagtaaatcttactgtataattctgaaaagggaaataagaaaacattggtaaaattgacgagcccccttctttgttagcatagaaattttattagtgtggagtgattgcatggttgcttttaatttggttttaatataggttactcttttctattttatacagcatctcttgggaacattaaggatagaaatagtaatggctgtagcttacgtttctttgctacttaatgatgaatatttatctggtgtacttactctagttaaatcattacatgataataattgcattcatccaattattttattattttcaaaaaaatcaatttcctttaaaacttataatattttaaattcttccaaatatttccacaggttggttaatattgataatgatttaataagcagtgaaaatggtgaacttattcaattatgtgattatcttaatagaaaagatttaaaatttgcattaacaaagttaaatgtttggaaattaattgaatttgagagaataatttatttagattgtgatatgttaattaattcgaatattgatcatttatttgacatttggttaaatgaattaacagaaaaagatataattgcatcatctgattcgggttggccggatattttcaattcaggtttattcattataaagccaagtattaatattttcaataaattaattgaatttcataaagaaaattattcatttgatggtgcagatcaaggtttactcaatgaatattttaatttacagagtaatataactggtggtaattggtatagattaccatttacttataattgtacattaaattcaaattatgaatatttacctgctttaataagatttaaagataaaattaaagtttttcattttattggattaaataaaccttggaaaaattttaatctttgttttgataataattttgctaaaatttttgaaagtaaatcatcaaatgatttggagaatttatatgaaaaatggtgggatacatttaaatcaatccaaataccaagtattacaccacttgaaatcttacaaatatctaataatattccaacattaaaagaacaattattaccaccaataatcttggttaatgaagaaactacaactgaaaaaactaaatccattaaattgacagctccaactgaaataatcaatccattcctttcaccaactaaatcatcatcatcatcatcatcatcaccaccaaaatcttcaaatattcatttcccaacttattattataaacatccaaattctaaaggaacggatattaaagatgaaagtacatcaggtgaagcatggaaaatgtcagaaagtaaaatccaatggcctgaaactcaaaaaaatatcaaatcatcaatattaccaccacacttaccaacatctcctccaccacaaaaagaaattaatattgttgatgaatatgttaattcacatccaattttcccatgggaatctaaaaagaaactgacacgtacttttgataatggtgttaaatatgaaccaccattatattcaattcaattaacaaattcaaaagaagataataacaataatgacgataatgatgataataaactgataggttttgacgatggtaataaatttgatcaatacctgcatagaattgaacaaactaaaatgcataaacgtaataatagtggagttactaaaaatttacataatgaagttgatttagatgataaagttgatgaagaaatagaaaaggtacaattaactgaaaaattagataatatgaagttgaagcattaagtatgagtaaggaatatgctaaagttgtagatgatatatagaagaggatgattatgattatatttgaaagaatgtactattatagatgttgttatttttgtgaatactaattattccttatttttattttcttttctattctctttttttttaatatacattatttaaatctatatggatttatcgttaacaaagaaactataaagttaaataattataataaacaatcaacaataatccttaataatgtagattagcaaatagtttagaggagggattcattatgggattttaaagaaaaagaatagaatattaacaaatagcaatgatatggtataaagatgtattaattattataattcattataattattgttgagttgcttgaggcatttgagaatttctagctgaagcattttctcttaagaaagttaattgtctagttctaaaagtttcataatgaactaaacttgtagtttcaattaaatcaaataaatgagttcttgttaagaaatctcttaaataaacaaattcacattgagtaacatcttcaacattaattaacccccatttagttcttctacctctaatagtttcaccttcatcagttgtaattatattttcagaaccaataactgcaaatggtaataaagatctaatatcattattaaattgaacttcatcttcagttaattcatcatcataactattttcataaggatacatttttaaattataatatttaaattgatcttgtaaaatttttttaaatttagttctttcatctaaagttaaagtatcagcttttgcaataattggtataacattacaaacttcagttaatcttttcaaaacttgaatatctaaagcttttaaaccataaccatttggttgaataaaatataaaacacaatgaactcttgtatctttaataaatttttcccttgaagcatttaattctcttcttaaaaattgattttgttgatctttaatatattttaaaattggttcccaagatttatcattattaagttgatcaccaaaacctggagtatcaattaaatttaaatttaatttaacattattttcaataagtgaatgtgaggtaactttaatttcagttgttctatcaacaggttcatcgatagtatctctaccattagaatcaaccatatgagaactgaaaagagtatttataagagttgatttacctaaacctgaataaccaaccatcataatattaaatgtaaaacctcttttaactaatcttgattcaatttgagttgtaatagtatcaaaaccaacataattagaaggatgagagactggagtgtccccattgagagtggtattgttcatatgaacactattgttgaggttattatcacttgcagacattactttaaagaagaaattccctttgtttacctgagatcaatgtccaaaatatttaacatgtcgtgtctcattataataataatattaataatatttgcccatttccaaattaagctaaataatatttttaaaaaattaacggtcgtcgcgacttttcaattaatgaaattttcatatttttttcataactattacttataccattcgtcgatttcatgtaataattacagtgattagttcttgatatctatattcttaaggacaatggtctctgctttacttccctccttacctgctgcaggtctctctgctcttctaccccgtcttccatctattagaattggtgttgcacttccttcttttttacaacctacatcaaatgaaaatacaattgaagatataaataataataatgaattagattcaggtatattacgtgcagctccaaagaagaaaacttctcatatgaagagaagacaaagattgtatggtcctggtgataaacatattaaattaaaggataatttaaatagatgtcctgcttgtggtcattataaaagatcacatttcctttgtatgaattgtgttggtcaaattagaaaatattggaaaaatagagatgcaccagctccaagagaagctgaagaatttacaaatcctttagatgaacaaattatttatcctggtaaaactgaaagagaaagtgaaaagaaattacaatcaaaggattggttagttaaaaaacctaaaactcttcctgttgaataatttatatactaatatattgatatattgatatatcaattatattattatacatatatccatttatactctatatagaatccaacatgtacataaagcatttacattaaccatttcattacattggtataatatttcaggctgtgttacgtaacatgaattttttttccttcaaaattatttttttttcaaacttcactatcggaccatttttaaatcatcttttgaatcaacttttcttacttacttctccttctttacgagcaaagtttatctatatttatcaaagaatgactgttgaagataatccacagaaaagacaaaaaactcatattttaaacacacatttattagcaaaatcaagatcaatttcttcttatcatcaaaatttaccaaaacatccattaggtattaaaccatctgcaaatataatactttcaaaggatacagatttacaaaaaattaaacattcagcaggtgatgcttttaataaactctcagatgatataatattaacaattttaggtttacttgatcgtgatgatttattatcttgtactcaagtttcaaaattttggtatgcattctcaacatttgatgagttatggagaaatatgtatacacaatcaacacctgaagaaagaatatcgaaaaagataacttttgatgaatggaaaggtagttggaaaaattcaattttacatcataaaagtgatccaattgattgtaccggacttgtatattcagatgcattatttacaccatatgcaaattcttgtattgattatgaagatattttccatgatataattatagaacaagaaaaattaagagatatcgatggttattgggatgccaacattttaacaaatccaagtaaatttccttatcgtggtagaattccacgaattgatgaagaaacttttacctatgaaatgtttgaaaaaaatcattggaacgatcatccatttatacttggatctaaaaaatataacaatggagaacttaatagatggccaaaatggacaattcaatatttacttgaaaaatttccaaatgttaaatttagacaagaatcagttttatgggaattatcactctatgaagcatatgcaaatgaaaatcatgatgaaaatccattatatttatttgattgtagatcaaatgcaatgaaagatttattaccatcgggatattatccaaatccaccaatatttgctaaggatgatttatttaaaattttcaattcgtgtcgacctgatcattcatggttaattactggacctcaaagatcaggttcaacatttcataaagatccaaattcaactgatgcatggaatgtagttttacaaggttcaaaattatgggtaatgttaccacctggtatgaaaccaccaggagttttcgtttcagatgatgaaagtgaggttatgtcaccaaatggtttagctgaatgggttaaaagtggattttggaatgatagtatacaaattagtaatgatgcaacattagatgataatgataatcaatttggatcaggtggttttagaacttgtattgttggtataacatttgaaaatgaatgtatgtatgttccatcaggatggtggcatacagttattaatttacaagattctgttgcatttacagcaaattttgtaccaccatgtaaaattaataaagttttaaaatttatgaataataaacgtgatcaggttagtggatttagacatgatttattacaatttcaattaaatgaatttattaaaaattataaaggagatgaaaatgaaaatattaaaatattaaaagaatatttagcaagggaagatctgaaaaataatgatgaagatgttggtgaattaaagggtactggatgtatgccagtttttgaaacatttgttgagtttttgaaaattaatggatatgaagatttacttaataggggattgaaagaaatagaaatggaaaatgctaaagttaaagagaatgagagagagaaaaagtccaagatttgggaggatttaacgaagcaagcaaaggaagaatcaacaggatttagttttggttttggatttgatgatgatgatgaataatgatttataaatatggataacgataaataacataataaaaaaaattcataacataatataaacaactctatagatgaacaattataaaatttataaaaatacagatataatttctaatctctaataaaatatccaacttttaacttttaagtattgaactaacagtttcgtaaacacctaagaaaatagcaccaccagcactaatccacattgttcttggaccgataccactaaataaaacagaataaccttcctcttttactaaagttttaaataatttaatgattgaaattctttccttatttaacattaatctagttttcaaaacatctaaaggagttgtgattgcagctgcaataccaccagcaaatgaaccacatagagcaccttttaatggagaaattttttcaacattttcataatttgcccataaagattttaaatgttcatataatgggaattgaataattgtaaatggaatttcacgcataattgttgttgaccaaccacgatataaaccttttaaaataccttcacctgatttatttgataaaataaatttaaaagattctaatgatgaattaaattgtaatgattgagtacgttgtttaataacttctgcaggtacacgtactaaacaagcagcaatttcacccattgaagctgaaatcatatgagataaatgaattgaagttgaattttcaatatttggtaaaataattggaattttctccttaaagaaagatttacaattatcataagtaatgaaaaataaagcagcagaaggtgcacttgcaataactgcactacctaaacctttatataaacctttaaacccaccatttaagaaaaatccacccttagcttgtaatcttgtcttcaaagtatcaattgggaaaaatgctaaatcagtagcagttcctgctgcccctccacttattaaagataccataaaggcattatattttgtattagaggatggagtggatgaagacattgtctataataaaataattcccaatcaatcaatccatcaactcttccgtcaatgaatcattggattgaaaaaattcatgttgacacacacaccgtctcggagataatataatttataatttctctcggagatagggaaattaacctaaatgagggggataaaaaataactttaaaaaatttcactctttggaaaaatcaatgattatatcacttggataagaagttgttaattatgaatcattgaaattgttctacatattttcttttgttctttttcgccttctctttattctctctccttctatcataaagtaatgtctggtgtcttgtttaatagtgtaaagaaaagagtacagagtgtacagtcaatctcatgtataaaacgttggaattcttcaattactccacctgctggatccacagtttcaatgaataatttgaaaattggtgattcaaagcatggtacaagaccaatttatttagatatgcaagcaacaactcctgttgatccaagagttttagataaaatgatgcaattttatactggttattatggtaatcctcatagtgcaactcatgcttatggttgggaaactgaaaaagaagttgaaaatgcaagagcttatgttgcacaagttattggtgctgatccaaaggaaatcattttcacatctggtgcaactgaatcaaataatgccgcattaaagggtgttgctagattctattcaaagacaaaaaaacatataattacaactcaaactgaacataaatgtgtacttgatacttgtagacatttacaagatgaaggttttgaagttacttatcttaaagttaatgaagatggtctcattgatttagaggaattagaaaaaacaatccgtaaagatactgcaattgtttcaattatgggtgttaataatgaaattggtgttattcaaccattagaagaaattggtaaaatttgtcgtaaacataaagttttctttcattcagattgtgctcaagcttatggtaaaataccaattgatgttaataaaatgaatattgatttaatgtcaatttcatctcataaagtttatggtccaatgggtattggtgcattatttgttagaagaagaccaagagttagattagatccaattattaatggtggtggtcaagaacgtggtttaagatcaggtactttagctccacctttagttgcaggttttggtgaagctgcaagattaatggttaaagaatatgattatgatcataaacatattaaaaatttatctgataaattagttaataatttattatcaattgaacatactcaattaaatggttcaaaagaatatagatattcaggttgtgttaatgtttcatttgcttatgttgaaggtgaatcattattaatggcattaaaagatattgcattaagtagtggatctgcttgtacttcagcttctttagaaccttcatatgttttacatgctttaggtgcagatgatgctttagctcattcaagtattagatttggtattggtagatttacaactgaggaagaagttgaatatgttagtaatgcaatgaaacaaagagttggatttttaagagaaatgagtccattatgggaaatggttaaagaaggtattgatttaaatagtattgaatgggctggtcattaataatatttatattaaaaaaattatatgtgtataaacggtttgtctttatgtataagggtgtctgtcataatgaaatttaaaaaaaaaacaatgtattcgattatataatgtataaatgaacataatgaaacgattttgaaggtataattaaattaaataagggattttgaaaagaatttgaaaaaataatgctaatgtaaattatgcttggatttaacctatgtgaaagaattcgtctgagaaattcttctttcaataattaatgtagtgtattagatagtgtattagattgataattaagacatgattggttaattgttgtaatatatgggtatcaaattttgtttatttggaaattattagtgtatgtgaaaatactttgattatttgttaatttgtttgtttaacaactttcattaattcattaattcattaaagttatatattattatcatcaaatttattcattatcacttaaatctggatttataactcttaaaccacctttatttgaattatctgtatcactaccagctgcatgcatcaggtaaactgccttgactaaatcttctattacccataccaatacttatttcatctggattatataaataagcaggtgttctaccataaccatctaaaccatttattcgtgaatcaattcctaaatgattatcacgatgaattgataatgaatcatctctaattgatttttcatcatcatcgaaactattatctctatttctacctgcaatacaaaataaattaattccgaaaaaccataataaaaatgctgcaataagtaaagtaccaacaacaacaccaactacaatacctgcaattgccccatgtgataatccaccattagatgatttattttgattaccaggtgtatttgaatctgtgatagagttagtgttagagttagaatttgaattagaatttgaattagaattagaactagaatttgaatttgaattagaattagaatctggtgcagaaccggatactgatggtgcaattgttgcagttaaaacatgagttgcggttttaatttcaactgaatatgatgtgacactttgaattatagtaactaattgtctactagaattatcatttgatgttgtaacatagaatgaaggtaaaactgtaactctagtaactatttcttcactttgtgaagtggttgttagtgtagacgatgaagtggatgatgttgacgttgttgttgttgctgttgctgttgtagatgtggaagtagttgatgaggtagtagttgatgatgatgttgatgatgttgatctggtggtagaggatgatgtagaagtggttcttggagttgttgaagttgaagttgaagtagaggtgggtgacgaagtcgaagttgacgatgatgttattgatgatgtagaagaagttgattctgaacttgaagtttctaaacttgtatcactataagatgaggaaggatccctggaaggatctaaatataccatataataattatctgtaccaccacatttttcttgaggaaaacctgaacagggggatgagcaaaaactagaatcaaccatagaggaagtatctacttcactaccacaataacattcatcaccattagttaatgcaataacataattccctaaacaagcatcttcacaataaccagatgattgatacatataagtattttgaaaagataaattatcgattgcagatcctgggaaacagcctaaattctggtagccataattaaatgcaccaattgctgaatgtaataagaataacagtatcagaggtagccttagtattgagtatggcatctgagtaacgaatgtgaatgaatattgaagagaataaataaacgaaaggccaaggagacagatcgaaatcaaatggattgaaattgaaatcaagtgaaatcaaaatagaaaacaaaaaaatgtactacagaaaataaattaaattaaaataaaaataaaacggaagaaaaaagaaaacaaaaacaaaacaataggaacagcgaggaaattttggtgacatcagttgttgtaatttttattattattattattattattattactatttccttctctagacttttattttattttatattcgttttatattcgttttatattcgttcaataatgtttatatagtggttatatgtagtaatagtcattataaatatagcactgatatatcactactttaataattttttaacttcagctgcaactgcatcaccaacttctgtagtagtatttttaccacctaaatcacctgtcataataccattatcaagtacattcttaacagcttgttcaataattttaccttcttcaagtaaatttaaacttaattttaacatcattgaagttgataaaattgttgcaattggattaactttatttttttctaaatctggtgcagatccatgacatggttcatataaaccaaatgcttcatttgtatcaggtaatgaagctaatgatgctgatggtaataaacctaatgaaccaggtataacacttgcttcatctgataaaatatcaccaaacatatttgatgtaataacaacaccatttaatttagttggtgatttaactaaaatcattgcagcactatcaactaattgattttcaacttttaattgtgggaattcattcttaattgtttcttcaacagtttttctccataaacgtgatgatgctaaaacatttgccttatcaactgaccaaattggtaatggtggattactttgtaatgcaataaatgctgccattcttgtaattctttgaacttcttcaactgaataagcttcagtatcccaagctctaccattaccattatcttcctctctttcaccaaaatatataccaccaactaattctctaacaattaaaatatctgtacctttaacaatattactctttaatggagataaatctaatagtttatcacttgcaaaattacatggtcttaaattagcatataaatttaattctttacgaatttctaataaaccttgttcaggtctaactttacctgtaccccattttggaccaccaactgcacctaaaagaattgcatctgcctttttacttgcttctaaagcttcctttggtaatggtacaccagttgcatcaattgctgcaccaccaataagatgattttcaaaattaaatttaatttcaggtttaacttcactaattgcatttaaaactttaacagcttctgcaacaatttcagtaccaacatggtcacctggtaataaaacaatattctttgtaacagtcattattatatattcttaattgatatgtgtatgtatatctgtagaaagataaaacaaaaggttacatacatatacctataactctattatcaatcgtccaactacctgcacatgtagtctaagtggaaaatctgtcatatactagtaaggcctttatcggcccgttaacgggagttttaatttaattttattattattattacgtaatgctgggctaaaatagtcgcgtctgttaaataattatttctttgattacgtaatactatatatggatctattatactcaaggttttataaactgaaactaataactaaagagaagatacacaacttatttttatagattaaatttgatcaagaatgaaagtatcaatatcaacttcatttaatggtgcatttcttttacttgatgcttgatattttttactttcttccttttgttcaattctttgaagtttacttaatggtccccatcctgtaactggttcctttaatgtaaatggttctaaaaatttaacacattctaaaaatgattcacctaatttgaaaatttcaaatataatatcttctgtacaaataactccaaattcacctaatttttcttcaactaaattattatcatttaatggaataattttataatcatatccttcaactaatttatcaatattttcttcagttttattattaacttgttctatcttcttcattaataattggaactttaacagttgcacgtttttgaattaaatttctaactgttgataaacttggtgtaccaacaacaacatatggattaattaaatgtaataatggttcaactttagaatttaatcgtacaaatgtaccttgattaactttatttaatcttaaaatatttaaaactttacgtgctctagttggaatttctcccatatatgaagttttaatacgaacaataaataatagacgttccttttcttcttctttattttcctttgtatcttctgataatttttccttaaattgtaatttatcaaattttgtaacacgtttaattctctcattttcacgttcagttgctaatttacgtgcaacaatactttcaacacgtataaatttattacttgcctttttctcattttgctttcttaaacgttcttctgcacgagttcttgcttgttgttgcttttcaatacgtaaacgatcaacattcttacgtttctttaataaaatttcaggattagaatttaatttcttatcagtagattgttcagttgcactcatattgtgtgttaaatgaattataaagttcaaactgtatatattacacaaagaaaaaaaaatatttcactgttaaataaattaaatttgttaaaatagattattatagataaaaaaaatttttttaaggtgaaaaattaatttttcttacctcttcttttagcgcgtctataggtcggtacacacatcaatctatactgatgtggttgtgatttactctcatttataagacctttactacttgtttccttaatcaaagtaccaggatgataattgtaaactggttcagcttctagtctttgcactcttttaccaatatctaataatgaatctttatctaatggtttttcatcatccataattttagttaatgtctttctcaaaaccttacacatttcaccactatatttatcctctaataaattgattaacactctactcataattaaagtaccacaaatttcaagttcctttggagtcatttgactgaatttctttgcaaacctttcaatttctgaacctaacaattcaccgacatgataagaacccaaaccacatctagatagatgttctaaagctgtcttgccaaataataaatcatttaattcaaccactctcttattaacatcatcaacataataaagagaatcggcatattgatagcaataaaaaatcttcagtgatttgtacgctgattcattgtttaaaacatcaacctttaaattttttgcaatcttttcacctagttctttccgaatttcgaaaatattattatattgaagagcatcatacaaaccacattgagtaaatatatatatattctactattattgcgaactttgaactaaattcaataattgattgttttggtaaaatatcaggcataatattcaaattggaataattaaaactaaaaagcttgaaatctttttcagttgcagttttgtacatacgtttatataccatcctagtaataatatcattaaaatggtataataatatatactcttcaacggcttcaacccatttgataaagtttgctccttgtttgtaaaaataaggtcgttcctcattaatatttatttgaacaatttctaaatgttgataagccctctttaaagccatgttcgcattttcagcatctgaaactttggaaactggtacagacatagtaattttactacctaaaggggtaactacttcaatttcagtaagtggttcttgggaacctgtcatttcgatattatcatcagaattagcattagtttcaactgtggaacaatttacatcaggagcttgtaccaaattcaaatttgattgtacatcatgagcctcagataaagaaacgctttggttgctcgtgctagtttggttaccactttctgacattgactgtaatttagttgataaaattgataggatatgaaatacggaataataaacttttaaaatattcactcttaatctacacaactataaaataatcgtggcggtgttgttaagatagtggattgtattaaacggtataaatctctatgcatattagaaagtaagtcaaaagagaataaagaaagaaagaaaaagttacataacggtaattataagcgcatgggtttttcaatgatttaattagaatttataatagtaaagctagtataatctttcaactttacctctgactgatctacgactagtttcaatatcaacaatctctgtaatatatttatgccatttcattgggaaaactcccttaccaaacctttctctggagacataaattgcattctctcttaaaatcttcttttcatcttcacctaaaacacttgcactgagtaacatttcagttaatgttggatatttctccatttcagtaattgatttattataatctggatcagtctcatctttgaaaaataatccagatttactgttaaatggtaatttaacagttttatttctctcttttctacttaatattttaccatcaattcttggtataacaatatcttcaaatggtcctgcacttgcatgaactaatggaattgctccattaaacatatattcaacaactgcaataccaaaatgttccttccacatacaattaataccataatctgacttttctagataattttcaacagtttcagttggtgcatttagttcaaatttaattaatttttcatcaatttcaaattctctaactaattcctttaattcattaatatatttctcatctttcccttcacgtactgatccaatgaaaattaatttatgtaattgaatatttggatttcctaattcatttaatttatttagatattccttataatgtttaattaataatttatgacgtttttcagggtctaaactgtgctaaataaacaattgttctatctcttttaacatccattaatttcttcactataattttctcaaatctttcatcatcataactaacacatggtggatataatatatcatcctcaacatcatctacttcttcttttttcttacccattccaatagctgataacacattttcgcaagtccatgtagaattatatagtgcagtatcaacacacattatattaattgaatataattttaataatacccaccaataacaatatttgattaatccataaatactacccatattctttgcagcattaagcatatctctactgactgttggataatgaatataacttataataggaatatcaaaaaatccaaaaacgatggaatagctgaatggaactcccattgtatcaataaaaatatcaggtactaattgataaaatccaattaatactaaaattatactaccaattgcttgtgatataatacttaaaaacttaaaataaactccattaattaaccattgatatttatcaggtaaatgaataaaaacaattctatctcttaattctggtctatcttcacttaaaaatttaattccaaaagttttatcaacattttctaaaattgaaactgctgatgttgatgtagttggtgtaaatgtataaataactgcaatattattaatatcactctctaatgttgatataactgcttcccataaaaccttttcgcctccacctgatgcataactaaaaggatgaaaaaatccaattaattttctacgattacctgcatgaacatcaattggctttatattaatcaaaaaattatatcttgattcttcatctttcctatccgctaatgggacatgtaatttataatattttgaatctaaattattaacagtttcacctttggcatctattgaatttaatggtaatgttgaacaactttgtggtttacttgtacccataattaatcttctcctatatgatgattttttaacaccaattttaccaattggtaaatttccatttggtttgtctagtgcaactttcaaagtatctctgtaatcagttggtggtaaaaagaaaaatctttgagtgaatggtctaccacattgataaataatataacacaaaatgcatattgctgttggtatagaagtaatgtgtgaaagtaatatatctttcacggaaaaagttgataaatctatcttagactgtgtttcaaacacattgaccatcttgtcttgctgattgtgaaagaaaaacaagtgttgctatttagaagtgaagaaatacaatcattcataaaggttgaaatttgatatctttacggaatttacatttcggcgatgtgcgtgtccttaatctaaaattgatttttgataataatgattattatataactatgatagaaaagatacttttataaataatactaaattaataatataaaaaatggataaaaaatgttatgaatatataagaaaaatagtttaattcaattgaaatcaattgaaactaatgattttcatcaatacttaattcaccaactttttcatttactttctcaatattagatttaccatttggaattgttggtaaactattattagaatctaaactaaaagttttaccttctaaaggaacttgctgtgacaactgtgaaggttgattagtttggtttggttggtgttgttgatactgttgtttaactgaagaggttaaactaaatgctctttgttgtaattcacgttgttcttcaagtaattgtcgttgcttttgttctaaaattgcttgttgttgcaataataaattttgttgttcagcgagtgattgtggtgaagtatttgaattttgagtcaacttgtgatgaaagattatttgaagttggatatactgtatttaaattaccaatttgaccttgattatgaatttgtggattatgtgacatatccatttctgaattttcaggtattgtcattcgctttgaattatcaatttcatgtttaattggaactaaaacaacatcattactatctaataatcccatacttaatgatgacataccagtttgttgacgtgataaatcattacttggtgttgacatttgtgttgaaagatagtttgtgttcttactatcaatatgttcaggtactgttgagaatgtagtatttgtattattaattgtatgattatcattagtctgtacttgttagtgctgtagctgaactaacaccacgtcttctaccagtaattatacttgcacttgttgatgaatcaccaatattttgtgatctacgaacacgctttctttctaaaccaattgatgaacgctgcaacagggacttggtaattgtgttacccttttaatatcattataccatgacatcattaaatcataactttcagctctgaaaacccaattatgacctttattcaataaacctgtacctctaccatgcattataacaaatttatgataagaatttggattcttctcatctttacgtgaatgttcagaaactgataattcacctaatgataatgatctttcaggtaatggatctttcttacgatcggatgatttgaattcatgtaagaaacatggagttaaaacataccaagctctttgataagattttaaaaatttggattttctttcaagccaacctgatctaatttcatatgtcaaagattcattttgatatttataacgaatttccgatgctctacgcattggtaaattcagttcaataaaatttttattatctctatcaataaatgaatcccattctaatgcagggatcttttgttaagattgttgaatccattttagaaattaaagtatcaaaaacattttgtgcttgttgacctaataattttgcataaactgttaaagcagtttgtaattcaatacagacaactttttctaactctttaccagaggtttgaatatttataaatgcttcatgaagataattttcttcagtaagttgacgtctaattgatctatcaagtgcaaatttaattaaatatggatcatttttcggatctaattgagatgattcaattttagctgagtcaattgatttaatataagttgataataatcttgaagtttcagattgatatctatcaacttgatttctaaaatcagtttgtaatgatctaatttccttaattttgactaataaatctcttttcaaatcttctaatctaggtattatagttgtacttaactctttaacagttgtttgagctaataaagcagagtttgaatggtattgataaagaattgttggtaaatcttgaattgaacctgaacctaaaggtaaaaagaattttcttgctaaatcatattcacttggtttattagtaccatctttattttcattactattattatttgaaaatgatgaatctggattaaaattcaaaattgatgaattatctttagctgaatgaaaaaagttaaagttattaccattgttattattattattattattatttgtatttaaaggttgataaaactcaccatctaaaccttgagtaataaatggaaaactaattgcatgatgaagtctaacttgctgtcttattatttcttcatgaacagcaacagattctttcaaataatgagaaagagcagagatgatgattctccaagaattgaatcttgatgctaaaatttcagtagggttagcttttgtaggaacagtaatcaaaagagggttggaaaattgtgctggtgttggaatttgtttactgttatcatttgcattaattttattactcgtattattagtattatttgatctaacatcaatattattatcaattgttcctgcagtagagccaatattcatacttgaattaggcattgcactactatttactgttgcattatttgaattgtttgtatttatatcatttgcagttgagactgaggacacgatagatttagattgttgagcttgctttgaacgctgactatctaaatgtttcagttgtaattggttttgtagcagttgttgctgtgataccagactcattgcgattgatgaaataggaatagaaagaaacaaaggaaagaaaaaaagaaagaagaaacttattgttttatatcagtcaactgttaaaacttctattctgttcttttacttagccactaagtgcaagtcatcatgatggtactcactccacaaaaaatatttttagctttcccctcagtcgcgtctgcttgtttttcttctgtttttgcgggtctttcctatttaggaagtattctcgataacatgattcatttccgaatttattttgttaaattgataggttaaccgataacactatggatgattccttatcgattgaccatttaaattttactttaatttccgttgtatcctttaagattttattttctccttctcctttttttctttttgtctgttgttcaagcaatgtcaaaaaacgttctcatagtcggtgctggtgtagtcggactcaccactgcaattgaattgaaaaataaatataaagattcagtaaatatcactattatctctaaagatctacctggtgatgatgcagttttctacacttctccaaaggctggtgcacattggatttcttcaaacaaaaaagaacaaaaggaatggcatttggttacataccacaagcttaaggaattgtctaaaattcctgaaacttttatcaaaccttatcctctatatatgggtgatattgttccaaaaggtaaaaaggctcctaaatatgaagaaccttggtttaaaaagtatgttgatggtttccaatatttaggtacagatcctaaattcccaggtgttgaaaatatttattgttttgactcttacactatttcaaccacttattaccttatctatttattatcacaagctcgtaagcttggtattcatattcaaagacatactttaaaagctctcaaagatgcagaaactttcaaattagagaatggttcagttgcagatttaattattaattgtacaggtttacaatataatttcctatctgattgtcatgattctaaattgaaacctgttcgtggtcatgttatagttttagaaaataatctaccttatcaagttacttttgaacaaccttatttaccaaaagatgcaaaggacggagaatttttaatgctttttccacgtcctgaaggtggtgccattttaggtggtatctatgataataactttttaaattatgatacttcaattgacaataattatgttaaaagattacttgaaaaggctagaacctatttacctgatttgttaaaagatgcccatcatccaaatgaattaaagattgctaaacatgttattggatttcgtcctgaacgtcaaggtggtgcacgtattggtgttgatccttcaaatcctctagttgttcataattatggtaatggtaactcgggttacattgaaagttggggttgcgcaaagagtactgctgagttagttggatcaattttattttcttctcctaaactttagttcttgatagtttaaatagatttattttagactctataactttttaatttattgatcacttattctatattgctcgtttattttactgatccacttttttattcatttagtaaatgtgtctaagtttaatcacggaaatgattaaaagaattttcactaatctccaaaatctatgattttcactttttaggtggctcagccaaaacatttttttgcataaatacttagtttaactgtttgaatactctttaaaaacctctctataactactattggctgtaaaaaacaatcaagttgctaattccctttaatatattatttagaatggaatatagtcaacgatgtaccttcataaataataaggattgttcaaacacaacattttttttgtcgtttcctagattttttacaattgactcgctgctaccaaaatatccgaacaaatttgctatctaaatacactttcttacacttttatacacttttgctttatcatgaataataatctataaattaatcagaatataaaatagtcaacaagcttattttgaaaaataatgaattaattggcaaataagtttacacccaaagctggttgaataggactatttcctaatgatcctggtaaatttgttggcgaacctaattgcatcttaatgctgtcaggtctcaattgaatactgctaaataagccatgatttgctacatttttgtcttcatcgacctcgttgaccaaactatcattatcaactttttcttccactatgttcttttttacttttttacgatcagtattctttttgactaaatccttgtccatttcattattgatcttcagtttttcctttccactattgtagttttctccgatattctccatagtatcctccctatatttaagtataggtgtcggtgttatgatttttggtttaatagtctttttaatggttggttgaccacatgttgtaagctcccaacgttttaatttatcaacatttgcacaacatttgtaatgatcactaactaattgttgctgtaaataacataataaagaatatatttttgttggaggattttcagctattgcatcagcaattacattttgtaatagatgcggagatggtggcattgagaagaatattaatacttcttctaaaagacttgttctaaatccttgtaacaataatgtaattatgtttttgaacaatttagtttgatttggaatatagggttccatttttaaacttttgaaaaactcttcaaattttgtactttgagttattgaatacttccaacaattgattgaatacattataattgtttcaacaaacgcactttgtataactaaaggaacttcatttgaaatttgattaacaagattaaattcaatcatgttctctattaaaataccataggcaagcgtgtaaatatatggattgttgtatttttttaaaccaaaagagaaagtaataaatctgagtaatgaaattattctattggaactatgctgtgcttgatctactaatgtgattctaatatctgttaaaattgagttcacttcttcaatactagtggctatttttaatggtatagttgggaatattaaatctgtaactaataaatctccatcttcataattatattcaaacatttgatatgtctttataggttccaaatcaatgagctctttaatactatagacaatctttttactgtttttacaagattctggctctagtaaagtctcagaataaatcgatgtatttgagctagagttaataaatctgccaagacttgttgatttacataattgatcttgcttttgctttctttcaggccttttgctagaaggtttgcttcgaactttttgattgtacaatttcctaattttttccttttgctctgcagaattatcctttggtgactgttcgctatattcactttcatcttcatcaataaagcttaatgctgagttttgttttattggctttgagtgataatgagatttattgatagaatatccatttttagtagaaaaagcggaaataggcaaagttttcaattcattagttgtaccacttctataatgcatagatatcggctttttaataatatcactatgttgttctatgtcaaaccttttttcatgaaatggcatttcttttaaagtttcttgacttgatccagtataaacaattgctatttcagaatcacttaattttttcttgctgttcatcattaaaatatattgtttgtatccaaaatatatgaaaagaagaaaagcagtcatagcaataacaaaaacaaatattaaaattgatcctacagccaatttcctatctggatcaacagcagtcggaacaaccatcacaacttcttcactcttatcgttaggttcctgcaatgtttctggccttgtcaaatctgctactgaaaataccaaagaatttttgacattatcttgatttatttggctttgttcctttgtgatttgcgaataggcaataactctactgttcttgttaccctttatttcaaataatggttcatgatgtccagatggagaatccgatagagtggtttctcccaaatttaaatacggcatttctttgagttatcctaaaccaataaatcaacgtaaaaaacaatcagagttgcttttcaatttgtatggttaaaagatataagcaaagactgaaagctttaatagattaaagtttcttggtttaaaattaaagaagcagctaccagataagaggaagatatcatctttcaaataaaaaaacaaaaaatagggatcgaaaaaatacttaaaagggcacttttctaatcagataattatgttgattcaaaatcttttgaagtacattaaaaattgttatttactatgttataccgccatatagattaaaagccatataaaacaagaaaaataatgaaataaaagaagtcaattacgtgcgatgtctaagtcctgataaccagaactgaggaaagctctatctatataattattccatttctttaaaaccttcttagatgggccttttaacttgtcatctttaccctttcctttgcctttacctttgcctttacctttgcctttacctttgtttttaccttcaatcttttctttatccttcctatggcttttcttacctttctttttttcaatcttggcgtcattctctgtgttatcattaacatcaacatcagcagtagcactaccaatatctataggtgcagtcttggcataattacgacccatcttaacccaatctttaaccagtaatgtatcagcttcctcatcagttgtgtaatgaacatcatacgcaaattcccaattttctacttctttcttggattttttatgattgagttcatttaaatcaatataatactgaacgtatctcttaggggataaagtctgaggagtataagcaggacccaaaggtaaatcttcaggcattatctttggaatagtcttatcattttcatatgacaccaaagatttaaattcctcagttttgaagttattttgatcattttctagttcaataaataactcttcaagtttagcttcgttatcaagttgaatctctaaatctctataaaactcatcccaactttcactttctaatacgttttctttctgtggatgaatgtaattaagtaagtttctaaatattgtattcttcttgccattttgtttatcagatgtttgattgatatctgtgatattatattcccaaacacgcataccagagttatatgttgggatgatactagctgaaatatgtgcaatagcatatctttctgaatgctcaccacctttcttcttcccctttaatttagcatacatcgtgtctctaatactttctaaatatgaaactttaccatttggtgctcccatatatctatcagagaaaacatgtaatggagaatctgattcatcatctaaattaaaacccagtgaggtatataaatcctcaactgtatcaaaatcattatcgaaatcatcatcatcattgtcaaaatcatgatcaagatcattcaagtgagctagttgttcatagttaatataaggaattgattgattttcgtccaaagcgccaagagatagaagtcttttttctatactcctccaagctttcacagaatctaatggaacccaatgatctatattcatatgaccccaaagaccaccaataattaaatctctatattcatgaatccaaacactaattttagcataacagctatgatgaatattcttaggaattggtggaacatgtccactgagccaaacttttaatcctctacgacgacattcttttaaagttgcacctagccataaaaataatttataacctggttgttttctggaatcacaattatcattcaaaggatttgattgaaaccaatataatgtattgatattaatcacaactaattttccaggaataacttctctagtaaaatatgcacctctatcaaaggtatgcatttgttcatttggtataaagtttctccatattctgtataattctctagtttgtaaagttggaccaggagcaaataaattgtgagggaaaacatcattattacctaaacttggaatgatcttaattcttcttgaaaatggatcaacatcttcttcaccctcatccataaaagtatcagaaatgttatttgaaacatattcattcattttaaaaatttcagcttcagttcttggattacttctatcattatcatgtctaatattatcaccagtccaaacaacaaaatcaatatgatctttcaaattttctttgatccaagctaaacttaaactatacagatccattggtgtatcgcaaccacttaatgcatcaccatatctgtgagatatatcattttcggatgtaatggatttaacttttttatgacattttttacgaattgctgcacctatcacatttagttcatcaggatgcatatcagtaatatgtaaaaatctaccatgtaaaacattctcttgtaccttaccacttgatgaatcaatagagagatattgtactgaatggtttggagttaaattgagttttttcaaatgttcggtaacttccaaactatcaactaattgtttagaattttgagtagtttctagcaccacatcattgttaaaataatcatcaaaatttatacttgtctgtatgaatataaaccaagttgaaacagctaaaaataaagtactaaatatgactttttttgataagaaagataattttttactataatggtctgacagtttcttcttatcttgaatggaatctacatctgagttcattacacttttatctggattattcctctccaaaaggctaggttcataagccatattgatagtgaaatattgttcgagacaaaagaaatgaattgacagaaaaaagttcaatctccagtcaatttaaaataataaaaactattaactaagttaattgacagcttcatctttgagatatacacactttatcaatagaaaccagcaaatgcctttctctattgcgtaatcactgcaaaattttactattggtgggggactaatattcggaataagttttatgggggcagcggccggggcctagtatgggatcacgtgatggtatctatggtcccaccgcaggaataatcacttgacgtcagataatttaattagagttataataatatacatgttaggttagggtatatagaatatatagtagtaatagtatatagcattacactgggggattcaatcaatcagttaatgaatcctcacttttaaagtaatcgtaattaattaatgcttgcatgtatccccattcagtaagtttattcttcaaccattttaattgaacaggttttgttaaataatcattacatcctgctgctaatgcatcttgttgatcagacgcacctgtagatgcagtcaatgcaacaataataataggtgatctaaataatgtaagatctaaaatatcatcattatttataacatgagaatgattagaatgtgatccgtgattatgattatgataactattattttcatctgaattaccacctatatcattcaatctttccagacgtctaatttcctttgtaacttcaataccactcatgaaaggtaattgaatatccataaaacaaagatgaaatcctcctaacttccaaatttctaatgcttccttaccagtagatgctatcttaaattgaacattacatgactttaaatgacgagccataatcttttgattaaccaaattatcttcaacaactaaaacattaatatgagttaaaatttttggcatatcatatttctttttatcctttggtttatccgctttttgtgatttggtactaaaacttttaatgttggtagatgtacttggtgtatttaattgtatagggacattattaggagtaattttaggaatattcatagagtttgtattaggtgtagaagtcgatgcgctaaagttattatcatttggtaatttttcaggttcagctggtttatcaattgataccggctctgtgtttaaccttaaattacccttcttcaaagagtcaactgaacgagtagattgttttctactgacaggtaatggcacgatgctactatcttcaatttttggagatggtggaggcggtgggacattatcaacttgatatactggtgatttagaagaatctcgtacatccttggaaaataatataacagcagatgattgtggagctgaaatcggtgagtctgaatttaatgattttagtctaggtggaggtaccttttgatcacctagaattgctactttactcaacgacacactattattatgtggtgtattattgaaagaatttgaacgacccatatcaattgaggacagttcagccctatcaactgaaggaccttttatatgactgggtgcatggttaaaattattttttattcttctatttcttttcaacaaatcttcattaagtttatccggttgatcaataatcaaagcgtctgacatagacataccatcgggaaaatatttatctaatattgaccatacgagaatatcaggctctaatactaatgttttagaagtcatctccgatgaaaaagtattattattgctgttattattagcacccagatcgccaggtgaatgagctaggtacagtatttgtattattagcattagcattattgttaatagtattagtattattggtgttattgtttataactagtgttaatactactattttgttctaaaagcaaacctgatctcacatgcagcattggttcaggtgatataggggtatttgaccgtaagctttgtgagtgtgataacatattattggataatttcgaaccaccggatgatagtggagaataagaatcttcgaaaggttttttcggaactggaaaccatgaaagtgcagattcatttactgttgaattagcattgttggaggtagtatcctgattcaaaaccatctttattactagatctgatggatcatattctaatgctaatgttgttggaaatttttgtgaaatcatgtattttaggtcatctacaatatcatatggaccaatcattattgttgttgccgtatggttattcttttttacccatattcttctcaattgtggtttctgttgaggagcatacatgcctcgactaaagctagactgtttaggactaatcgtttccattgtctgtgatattgatggtagcatgaaagagcagtgatagtggaatggaatacagcaatattgataatgcttaaagtgtcttaacagtgtcagctgaaaaccatttctggcaactattgcgatgaaattttacaacatgaatttttcctttaattttctcctatgacaatgtttctgtcgcagctttttttcacttttagctcttcttagtgtaagtgtcttttgagtaaatagagaataatgaaggttatacgtcatattgtaccgcaaatacgacccattgtaaaaaaagttgatgatgttaatgcatgggatgctataggtaacttttggaaagcgatgaagaaatccaacacaagttatgaaaatcctcaaaataatcaagacgatagtatagagataatacaatttgaaaaagcagttccaccaacgatccctccatttacccctattggaagatttgaatttgatgaaaaaatttacgaaagccacaccagaagaagtagaaaatgcaccatttgaattccctgaatctcgttccaatatcgtaggaagaaacactccaatctgtcgagactttacccaactaaaaggtgcaaacaacgatcttttctgcatggcaataagtcgtgggcttactagaaagccagctatgtttaaaagtaaatggtttgtctttcattactaccattcggattcatttctgggtaatattgtcaaatctcgtccgggggtccttgtttcatgtcataatacaaatatatttaatacacacctacaaatcaagggagaaattcctaaaagtattagaaaatctgcatttcctttcaaatcatcagtttatagaacaaatttgaagaaatttttgagaaagagctttttagatttatatctaaaagatgagagttttgctaacaaatacaactggtttatatgagttctcaatcaacttgtaccctaaagatgaagaagaaaaaaaagaattcattgaacacctagctctctgtttgaaagacgtagccaagaaaacaaaaccaatgagtgaaagagatattcaatgggagttaagcagacttccgtggtatgacgtacaaagagttttgaaaagaaataacgtacaagacttcgaatttaaagattataaacctcatagtagaccaaaaagacccaggaaaaccaaatagaactcagtaccaaatggcattaacatgcatgaaattgtagatcatgtcatatagaacattcatagaaaatcaagaaataagacatatttccctcttgttaaatagaacaccaatctggtaatttagtttcaaattcccaaccatccacatggtttagcttatatttgtatgcatgtaaatacattaccatatcctcaggcttttgttgtttatatagtttagcatcacatgtttgacaaatttcattgctttcagcttctaccctattatcttccgcttgtttgctaataatatcaaagtaatcttcactgatttccttataatctgcaccatcttttaattccattaatttcccattaccatataatggatcgttcattatagggtgttgaagatttcttaaatgtattctgatttgatgagtacgacctgttttaggaaaacatctaataatactttgatccaactccttattgtatgataccaattcaaatatagtctctgcgggttttctagttataccgtcaactttaccctttttagtatccaaaattattatatcatgatcacatcttgtttttccttcaggaaacttacctttaactcttgcaagatatactttctcaacatctctattctggatatccatttgaattttacgagccgtttccgtatttttggccaatatgcatacaccacttgtcagtttatctaatctataacatggtcttagtattagttcaccaattcttggtttttcattcggccatccttcattttcaagaattttgaccactgagttgtagtaatagttttggacgggatgaattggtattccgctaggtttattaactaccaaaatgttatcatcttcaaacactacttctaagttatccttctcaactccaaaaattgatctttcatggatgtgctcaattctttggatcacatcattaccaatcaatttgtgatccataatttccggatattttataatctttttattttcctttgctgaaccttctttcattgaacgtttttcttttttagatagttttatcggatgtataacaataatttcttcattttctaaacgttttttatattcagcgggtgtgaatgatctgaactcactactgaaaacatctaaaactgttctttttgaccatcttgccttcactgttgtcgttattgtttggaaatatgggtccaccgttcggattctgcctgaaattatgtaatttggttgtattttatccatttcttttttgggatttctcttattccagttattcaatagattatttttcagatactgttttgttcctttaatgataaagcacataggcttaactttaatttcaacttgtcttgtacttagagcaaaaaagtattacaaaactatatctttccgatcaaggaaggttccaaaatgcttaaaagatttggaaaaaaaacattttgaaaaaagtgccattttttgggataaattctaatctttttcaaatatttactatcggctatcggctgtacagttttgtacaattaacaccttgtgttatgacctatttttacgtataaaattacgtataaaatacattaaataaagtattgattggtctaaaatagtctacatataatttataaattgagcttattgacgttgttgactcaaatgtctagtgataatacgtccattatctaaaaatgcttgaacaagatccatgtagtacaaaggatcatcctcaacattatccatacttcgaagtaatgctggtgtattaatttcaagttcaagctcatatttcggcactctattatttttctctttaacttttgttaaatcgactttggtaaatgttgcttgatgaatatagctaattctttctttttctctttccatagtgactctctttttgaatatttcaaatgctgcatcatttaattcatttggaagttccacagataaagataaacgtaaatcaaatagtgtattcggaaaatgaagatataaatctgatattctttgctttgtaatattattggtttttctcttagttttcacatcaatactaacacgtcctgaaattggtttatcatttctacgtgaatcactggcaattaaatcaagaacgtgtgaactttcagtaatatacttattatttgcatgacctctaccttgttgttgctgttctgctgcttctttaatcaatttgttcataaaagttttagtatcattaaaattttgtaatgttatacctggcttgaaaaaacattcctgatttacatagtctgttgcaacaacacattcagtattaactggtaattgaatacgtgcatctctcactttatcccagatattacccaatttcaattcaatttcaatatattcttgaacattaggaacatctaaataatcttgtttgacaccttcaacatttgcccaaatccattccgtaacaagtttgttgaaatcatttcttggaattgagccagtaattgatggaatatcaagtttcgaaataccacctaatgaaccatcagcatttgttgtttgtttaataattctaccagatgaaattacacgattgattgttggaatatagtcttgagcccaagttggtttagttttatatcttcttggtttcccatctgatggtgcagaatcaacctccggttgttttttaatttcttcaagtttttggatttttttatgaatactttcatgcttattattattaccttttgttattaaagattcaggaattggtggcgtatcagttgtaggtatttctacatccttttcatttgttagtgcacttatactgtttctcttttttatacgtgacgcattttcttctgataatgattcagaagcatttaatgtttgcataggtgaaatgatattttcattattaggttgttcttctttataacctaattcattagagtttgtgaatggggcaagttctttgttcagttgtaggattagatgcttctatctctttttcttctggttttggaatgggaggtgcagtttcggaagtattattcattaaattatgaatcgaaagtctgggttcagaagctcttttggtcagatctggttgaggttgtgcgttttcatttaattcgtctgacgcttgcctttcatcatcactggttcttgaaatcaagtttttcaagtccatattactattttaatgtgatggtgctgccaatggtgaaactttgtttatatcaacctaactctgaatagtactgcaaatttattctgaaaattgctggaatattgtcactaatagtgattgatgtaatttttcaggccgcgctacagctgttcatgttggagctacactactactattagaatagctatattacagtgtaattaataccatgattatagtattgatttattttgattttgttatattacaaagtgtataaagctaatgattctataagaaaatgtttagttcaccttactttcttgtttcaaatttttaattgatattgatttacttcttttaggttttccgtataaaatattgtgggagtggggtataatatcatttttgcaggaatctataatatcttgcatatcagctatcataaattttgtttcatttcggacataatcctcttcattgaaaagtggtaaatgctttatcaccatttggacaaataaatagttctggacttcttgatgcgtgtcttcccatatataatgagctgttatttgaatctaaattttcactatgtacattgagatccgtggaatttgttggaattgatatgctgctacttttgtcaactttattaatttcatcatcgatctgtaaattatcaatctctttttccacattttcatattttgattcctttaatggattaagttgtgctgaattttctgttgtggtgatttttggcttttgaggggaaaccagagactcatatttatgtgttttgatatctacaggtgggtaaatcatcccacatactatgtttaatatcattttgaagtgttatttcttcatttgaatcaatttcaaccttgaatttcatttcctttgatttctcatgacgacaaaaattgctttcataatccctttcattaacacaagtttcaagtttttggaaaaaaagatttttaaataagtaaggtaatgacattcttgtttgtggattaggatcacatagtcctccaaaataaataaatgaaatttggatcattcccatgtgcattactgaaaacacttgatttgggtattttaatagttatattatctttgaaagttggattcaattccagaaatttattatattcaattgtgtaaagtttaaaagctggatctgtcggttttgaattaataaatggaagcttacccattattagcacataaagaagaatacctaaagaccaataatcaaatttgaaaggacaaaatggtttccttgattgttcatccataatattatatgcggcaacttctggtgcttggtatggtggtgttcccaatcttttcgttttcatagctattggacttgaaaaatcaccttgacttgtatgcccaaattctgaacatccgtaatctgttaatttcatcaatccattagagctaaccaaaatattatctgcctttatatctaaatgaacaatatcattttcatgaatatatttcaatccaaatgaaatttgtttaaatatacacattttttcagcaaaaggtattgatttccatttattatcccttatcaatttatatagatcatattcataaaattccattaccattccccaagcattttgtaatgtgaaaggtaattgtagtaaatcataacatttaacactatgtaaattaaccatatttctcgtaattaaatattcaactaacactctattataatattttgattgtgtttcagttttgaataatgaaaatttctttagtgcaaatagttgatctttatattgtaaatccttcttattatataaaagtttaatggttgatgagcctcccaaaccaatgtttctatcaactaattggtatttatcctccaaatacacttcagtttctctataaagttcaggtaaaaagtcatttgggtttgccaatgggcttactaatcttaaatctggttcatcttttttaattccatcaccaaaggctgatcctaagtttgatatatcgtgatgattataaattccatatggattatattcaattttattatgaccatataaatttgaactggaaaatgacttactacgatgattcaatgaaccattagttgataaattcagccctgaattccttttagagtgtggtctatgttccgaatctgtactactattatgattcattttagtttcttccacatcagaagattgatcaatatcaaatgatacacggtgttctaatttgttatcagatggtttacttgtagtatactctccagcattttgaccggaacgtttctcctctttcggtatctgactcttatccttgaatatcttagttgggatagaaacaatttttttaaaaacacctttatgttccttaggcatggtagtttcttttggagtgaaatctgattttggattcattatagttttactttcctttatcattaattctaatcgctgtttttaaagatatggtatgaaaaacaagataagaatagaatgaaaattcaatgaacaaaagaaatgaagaaaaaaatatttattacaattgatgtattgtatgaattacatttcctgaagatattcaaagtgtttacgagtgatgctattaagtttcttggtaatcaaaccataaacatgtgggcaccagaaaagttacccgagtatagttctccaaattctcatgatgtggaatggctgtgcgcttctaagtttttccgctatggctcgattttttctgtttataatgacgtattggagttatttctctcaattagagtattcttattacatttttgatgtcttttattggtatttgtgtaggtgtatggtggtagtgggactctataaatactagtgtataaataaaattaaattaattaaaaaaattaaaaaagaataatttttgctaaatattttgaaaatttggtaattttttttgaagttttgaaccacccccttaaaagtaaaaatttactatttcaacctggttaaaggaaatataatgctgagatgaagctttggtaaaaatatcaatcactcacaaggtctatgtaatgaaaataagagcattaaagtttgcgcaagtcacgtgaaaaatcagcgtggagtctgcaaaaacagctttttcgcactgtaagggaataaatacaagttgttcaataatatccacgtgaggattaggtaagctgattacgtaaagatgataagatggaaataggaattccgagatacggaggttcggagatgtcggagtaagaaaggaatgacttagattgaaattgaattaattatgataaggagtggtatgattgataaggaatagtttaattaactatattaaggaatggttaatattgtaatataaataagtatgatatcctgtataactttgtataactctcttctgagaggggacattaatcagagtattagttagagaacaatctactaattaataccaaccgtctcattgctactcgctgtctattacacaaataaaaggtccaacgagtaaacttattttatacttattacttccattacgtaattaagtattatccactatcttacatattttagtttacatttggtagcaccggctagtgtttgtgttcctaattaaatcaaattatattcatctattaattaaattaaatcaactaaaaatgtcatctgctaaagataagattaatgctttaaagcaacaaattaaggaaataaaattaactgaaaagaagaagaagaaagaattgtcaaagaaacattctatcaaacattcaaagaacgttattaaaaagaagaaacatattaaaccacctcttagaattatccattccgatcctgaaatgtctgattattcatttgatgatgctttttcctcagataattcccattctgataactccaattctgattctgatatttctgattccgatactgatactgatgatgataataaaacttctaaaaatgataaacttagttctaactttccaaaatttgatggttcttctactgatgataaaggcaaggaattctccactactgaagctcaacttaaagcaaaaacttggttatctaagttgcacgttaatttaattgataaaggtatttcaaaatcaagctgggctagaaaagctattgttaatctcgaaggtagagcatacaaatgggtagaacataaattagagaagaatccaaagtatttaaagatttcctgggaaagatttttacgtgatttcaaaaaagaattttgtcctgttattgaagatgatatgcatgctatggattacaagattctaacttttaaaatggttccaggaatgaaagtctctacatattctgatcaatttaaagaatatattcaagaattggattttgaagaatctactaaatttcaaatttcaagatatttacttggtttaacacctgaattgaaaaagatggtatcccaacaaaaacctcgtaccttgaatgctgctattcattatgcagaagattctgaagctattttgaatgatattgaagaagcaaaaccaaaaaatccttggatcaataatatcgaacatcaaactcctgttagacgctcttattctcgcccatatagagttaataaatataaacctggttatcataataagcaaagatttttcagaaacaaaagaccatttaaaaggtacaattcaaattttaccccaatcggtggtaatcgttccatgcatttttctcgtcctactaaactaaataataaactatctaataataataatactagttctttttcttatattgcacctccagtaagtattcaacccgaagttgatcatttaaatgtcgagaaggaagaaggtgatactgttgttaataattctcaaagggtgattccaagagatgagactattaagaagggtgattcctctgaagttaaattgttaaagggtgattccaaacaagaaacaaatagtccaactttaaacattccttcattacctgaaattttacatgttaatgctttgaatattgaaaatttacgaaaaatagatgtacaaattgataataaaaattccgcatcagcaattattgatactggatccaatacagatgctattactacaattttatgtgatgaactgttattatcaagcaagattagattatatgttgaaccaattagtgctattttagttaatgatactgttgatgctattggtgaactagatatagatattgatgttgatctatttaataatcctatcaaagaaaaaagaacatttttagttttgcaggcaaacaccaagaaattaattttaggacttccatttttcaaacaacattatgataagttagatatacatgattttattggagatagttttgcaacaccaagtgttaatgttaatttaattgaatatcatgatagacatatttctactattattaataataaagataatgattcatatctaatatatattaattcaatgaatgttgaatcctctgaagaaaatgatattaaaactattgataaagaaattaataatgttgaagttaataaatacagaaatgatattttagaaaaatttaatgatgttgttactatgaaagaaccaaatgaacttcctcctaaaagaaatcacgaacataaaattattttagttgaatctaataagcaagttaatagaaatcaatatcctttaagttattcagaaaaggaagaattaaccaaaactgttgataagttaatacaacaaaaatttattagaattagtgatagtccttataatagccctgttttatttgttaagaaaaaagatggaaccatgagaatgtgcattgattatagattgttgaataataacactgttaaagatagatttcctttacctcatatagaagaaattatttccaagtttgaatctgctgttgtttattccaaattagatttaatgtcaggttattatcaagtaagaatccaagaagaagatattccaaaaactgcttttagtactgattatggtcattatgaatgggttgttatgccttttggtcttactaatgctccagcaacttttcaacgtatgatgaatactatcttatccaaatatttgaatacatgtgtgcaagtttatttagatgatatttttatttattccaaatcttataagcaacattatgaagatattaaaagtgttttatctacattaagagaacatcatttaattgctaagaaatcaaagtgtgccttcttttacgatgaattaagatttttaggtcatgttattactaaaaatggaattaaaactgatccagataaaattgaaaaggttaaaaattggccaattccaactactgtcaaagaagctcaaatgtttataggtttaacttcatattatagacgttttatcaagaatcattctaagattgctgtaccaattcataaatttattaccaaagaatcaaaatgggaagatgaacaaactaatgcttttaatcaacttaaagacgctttaattaacagtcctattctagtacatccaaaatggaataatgattgtacttatgttgttcatactgatgcttgtggtagtgctttaggttatactttagaacaattagatgaaaatggtaaaacaagaggtacaattgcttatggttctaagaaattaataggagctcaattaaattatggtatttatgatagagaatttatggcagttgtagaagctttaaaaaattggagatattatttattaggtagacattttgttattgttactgatcataaaagtttaatttatctacgctatcaaaatttgattgattcaactagggttgcaagatggcttgattatttatcacaatatgattttgaaattcaatatgttgcaggtaaagataattctgccgcagatgctttaagtcgttatccatatgaaaaattgtctgttaaagatgctttagaagttaatcatattaaatttttaggtaattcaaatagaaattcaaataataatattcaaattaataatactgaagttactgttactacttttcctatgaatgatgaattaaagaatttaattattaaaggttataaaaaagataatgtacttgctgatgtttattcaactttgaaaaataaatctgaaattcctattcatttaaaccaccatattaaacattatcaacttaaaaatgatttactttattataaaacattattagaacaagattgcaatagattagttattcctcgttataatagtttacctcaaagatttattaaaaatgctcataataatcctacttctggtcattttggtccttggaaaacttatcaaactttaatggattcattattttggtttaatatgatgcctacaattaaaaggtattgcaatagatgcattgtttgtcaacaaaataacacctctactcagaaaactcaaggattatttcaaccattacctgttcctgaaggtagatggactgatgttacaatggattttgttactggtttgccaacaactacttcaaatcatgatatgattatggttattactgatagattttcaaaaatgtcacattttattccaactgtgaaaactttaactgctgaaggttgtgctaaattatttttagattattttcttaaacatcatggatttccaaaaagattaactagtgataaagatattaggtttatgaataaattttggtatactattcattttttctttggtgtttctttattgttttcaactactaatcatccacaaactgatggtcaaactgaaagagttaataaagttttaaatcaattattaagaaaacattgttcaaatgatcatttacactgggatgaatttttaccaatgtgtgaatttgcttataatagtacttaccatgattcaattaaatgttctccttttgaattagctataggatataaaccagattctatgaaaagtgttaatagttggaatttagatgataatagatatagtccaaatgctcaagaatatgctagacgtatgagattaactttaactcaagctcaagataatattgtacaagctcaaagattgaatgaaaaatatcataatagatcacatagatttcataattataaagttggtgattatattttattgcatcgtgatgcttttggtgcttttgctaaatattataaaattcaacctgcttattatggtccatttagattggtgaaaaaaattaatgataatgcttttgaagttgatttacctaagattaataaaaaggatagagtattaaatattaaaaattttcgtccatatgttcctccagtcgatttattatgtcgtccacctagaactaatgctgaaattttatcaagaattaatcaaatgtgtggtattgctggttttgatgaagaaaagaatacttttgatgtttattggagagattgtgatcctttacttgctacaactattactgctgatcaatttaatacggcttcggaatcacttcgtcatagtttatttcataatgccaagatgatttgtgctcatgagcaaattgtttaagtatttgatttaatttaattttaacatcagggacgatgtttcccaacagccggggtaatgtaagggaataaatacaagttgttcaataatatccacgtgaggattaggtaagctgattacgtaaagatgataagatggaaataggaattccgagatacggaggttcggagatgtcggagtaagaaaggaatgacttagattgaaattgaattaattatgataaggagtggtatgattgataaggaatagtttaattaactatattaaggaatggttaatattgtaatataaataagtatgatatcctgtataactttgtataactctcttctgagaggggacattaatcagagtattagttagagaacaatctactaattaataccaaccgtctcattgctactcgctgtctattacacaaataaaaggtccaacgagtaaacttattttatacttattacttccattacgtaattaagtattatccactatcttacatattttagtttacacgcacctagttggtacattagctcagaggtttagagcatcgtgcttatagtcgtattacaacgattatgcttatcgcataactccgttttccaagaaacgcgatggtcgcgggttcaaaccccgcatgtaccactttttttacatttcatttcacatcattaggatctacatgaattcaaatcaaacgttgattgattgaaattgtttcaactaattgatttattcaatcctggaagtgactgtttgattattttttatatcttcttttgtcagattttttcaattcttgatatggtatttgtgtggttaatagtatgcactaatttattgcatttggctttggcattgactaaggatcaaatatttcaacatgattggcaaacatatcatattggaattccgttcaaatctatagagttaaatgatactcttataacattatcttcaaacgggatattgtcaactataaatacaacagatggtgatgttttatatagatatcaatctgatataaatcctgtatcattggattctggattaattccaattgattcaaattcattcgtttcatactttaattatgaaaatttaaatcaatcactgttgatagtttggaaatcatcttctttatacggttcaattgaaaatgaatttatctttgattctaaaatattatcagttcaaccagcattggataaacttatcgtttttaacgatatgtctatttcagtgataaattataggaaacgtaaaaactcgattgaaagaatatttgaaagttcatcattaataaaaaagactaaaactttttttgatttggaattaaaagaagttttcatatttgtagaaaccgatgaaggtattcatttctctaaattatcaaattttgatcttaaaccgataaaacaattagagatttatgatatttcaacaatgagatacaatcgtggacacattatttttaataatgatcaagtatttgagataggggatgaaattgtcaaagttgacacaaaatcaaactttaatttaataacgaacaaactctctgcaaattctttgatcagtactattgtagataaatttgaagtgattaatgaccatgtgattatagagtccaacaatcatattaatttatttaatcatcaaaatgtttcatttgtacctaatgttgcttttgaaatcccaagagaatttttagactccgtttatctctcttactttatttcatctgatgattctcatgtcaatattttatcagtttcatcatctgatgttgtttcatactatgtcaatggtctattaaaatggtcatcagatcaatcatttactgatatagttgatattgtcattctggaaaatgagcatactgaattaagtatatctagttggagttccttcttacctgaaaaaatcgaacttagtccaatgaaattgatcacaagcatgattaaaaatttatacaagattgttataaatgatttgaaaactcacattaataatgataatgatcaattgtttggaatgtgcaaaaaattagtggttttatcaaagaataataaaattggtgtctacaatatgaataaacatgaaagctataaaaatcaactagttgagatattttccatcccttcaaacattaaaatagagaagttgcatttggtaaatgatgaagtcttaggagtctcagatgacgggttgtttaaaattgatatagcagaaggtacttgttctgcggtaactgagaaggacaatattaccaccattgctttgggttcaaaattgatagttttggactctttgcctgaagtactgtatacttctaatcatgatatagaattaaatgaagtaagaggatataaaatagttaatggtgactcttttgaaactttccattattctccagaaaatgaacaaatactttcactaacaaaacgctcatatggaaatgataaggttgcacaaaatggtatagttttatcagatagatctgtcttatacaaatatcttactccaaatatcggagttataacgtcgtatgctcaaagctcaaacttggttgttattagaattatcaatcttgtgacaggaaaaatatatggatcattaaagaaagaagttaaacctgaaatagacataaatagagatattaatgtcgcatttgaagaacactttataatattcacaatccctgatagtaagaattcattaaatacagagatttgctcaattgatttatttgaaagtttgaaaccaaatcaaaaatttacaaaagacgttactgaatactcatcttttggtaattcagttttaccatcgtttgcttcacaatgttttattattccattttataaagtgaatgatttatcaattagtaaaacagttaataatattgcaattaaagatattattttacgtacatcaaatggccaaataatgtccgttccaaagatgatgatagatggtacaagaaatggtgttattggtaactttaatagaaatggaatttatggtttagatttgagtttggataatactaaaattacatcaaatgctccaagtatttattcaagtgttcaatcatcatctatagtgaacaaattcacatttaatcctatcataaacttcagcagtcaatctatattgtcacatataagaaggttgacacaaaattcactaaaagattctaaactatttactgttcctacaaacctagaatctacaacatacgtcgtttcaatcgatggtgatatttttgtaagtatattacgaccttcaggatcatttgataagttgacaccagactttgctacggggacattgattatgaccatagttttccttactgcaggaataatatttataaagccgaagttacaaagacaaaatgttttacgtctttggaatttatagttctaatgtttaattataatgtgtcaatgctaaattgtaaattgataaagagaaaaaaatctatatataaaatgcaagtgtcgatttgagtttaattaaatggttaatgcagcatatgtactaataactccaaaaatcaatgcgataatcatcactaaataatagaaccatctattctttggcttgcataacttcaggtaaaatgcacatggtaaaacaatgcaaataagtgtacataatgatgatccacttaaaccaataattttatcaaactcagggtataagatacccaacaaaacaaacattaaattgacaccaattttaatagaagcagagaacaactttgtcatgaatgtaggacctttacctgtcatttcaatttgttgtggagtaataccgaaaacaaattctgtaatatttatgattggtaatgcattgattggagttttagcaactggtatcaatgaaacaaaaatactagcaaaaaagtaaacaaatttaggataacctgaagtcaacaaaacagattgtgtaatttcatttaagatacctgcaccgaacatgaagaaacctaaataagccatcgcagcatctgcaaaaaatccaacggaataagtggttttaagacatttattgaattcttgaggtttaaccaaatctgcctttaatgtgggaaataatgaatgtgaaccaaatgggcccaaaataataccatatgaaacaaaaaggttcatgagtgatggtggagaaatttcaaatggtgcatgttcaattaatgaaccaggtgcagtttgtttaactaaaccacaaaagaaaatcaaaaataccaatgagattgttgagataataccaattaatgaaatatgagataaaacatttaatggaagaaaagaaaatggagttaatacaatgaatgcaatcaatttaaactgaactaaggaaattgatgggaataatgcatttaaagaatcagcaaataaaaccattagtgaaacaccgacacctaaaagttcaacagtaaataacaatgaaacaaacaatcttgccttagggccaaatgctttaaaaccaatatcagcataggtacaaagagttggatcggtatccatacattgtgacaaaagagtagcagtccagtaagtaatagcaacagagtaaatcaacaggagtgtaccccaaaacagacctgcatgaaccaaggctcttgataacgcaagtaaaccaattccgataagtgcattaatacagttgaaaattgtttgtgcaacagttgattgaggagcaatcatagttaatttaacaccattttcagtctcaacttgacgaacaacgatagagtcggcatcattggtgaaaaactctagataattgatttccatgtagtggaaatacagaagatgcaaatgatggttgtcttgagacaacataatcagtaaatgaatgatctgccaaggaatgatcatcatcatcagctgcttcatcaaaaacgttattattaggagaagcagattcaataaaatttggtcttacaccaaagacagtagatattttcctacccattgtagaaggagcaaatgtatttcggatcaataagttcttcatcatctttaaagaaggatcttgatgcttttattcttggttcaattgatatagaacgaaatgattgtgctctttgataagagtttgcaaaggcagaaaggagttccctgcacctggagatagaaaaggattcgaaggtttgccatttaaatgtctattatctggatgaattgggattgcttgataaggagttgatgcaacatgttgtctgttaatattcataccagcattagcagcagctgcatttaatggagtgtaagcagttggtatgccttctgaattcttgtgatccatatccctgacaattgatccaatgggttatgtagagatatcaatatcaatctgtaaccattaaaacatgcatgtataatatcaaacaatcttttaagaagcaacccagattgtgaaacgtaaataaagagcatccccaaaaaatgaaatttccgccgcaaattttgcagctttttttgatttccgtgattttaattttccgttctgtttccatgaaattaatgttatgttgatctactctttaagatgtgtatatatatccatcagtttagttgtttatcttcttttgatataccaataactgcaagataaaggatgaagaacaccttctttattttcacattattgcccctgattgcacaattagtttctggagcttatatagctacggaaattgctcctaaaacaacttttacaaatactgtgaatactatttctgaaccaactggtttagtaaaaagagatgctaaaaaggctattgttaataaagaatggcttaaggatcaatctgaaaaaatgtatggtacagctgaggaaccagttaagccatggattagaacaattcatgaaaccgtcgttgaagttgttacaccatatgttgttggtggtgttacatttgcagctgaaagacctgcaactacaaatggtttagaaccttggatttctatagatggtaatggtttaccgaaaaactataacaccaaaattagatcatgcaactattgctaaggcataccctgatgttggtacctatttcaaaactgcaactactgttgttcatcatcaaaaagatatcaatgcacataatatgaaagaagacgaaacaatcgaactggttgaattaattgatgaggatgatacatatatccaattaattccattacaaagatgtacacctgattattatttcaaaaaaggtattacaaacatggaaagttctgaacctttctgtgctccaaaggatcatagaaaaatgagagttggtttaacttattttgtaacctggtttacacgttatttccaagatgttgaaaaagttaaattccactatgcatatgttaacgaaaaacatcacgataaaggtttcgataagagagatttatatgatgaatccttaaaagatatggatgctcaaattgaacaattatcaggtaatcttgaatttaagggtgatgttgaaggtgcattctactcatctaattggattaagaatgaaggttggtatgacattgaaattgataagaagtggttaaagggcaaagtttataaaaaagttgtaattgcaatccaacctgaaaatgttcctgatgaagaattctcaatcttggatgctgcacatttctttgcaactttccaattaatggaaagtattggtaaaaatactaaggaaatgcgtaaactacaggatacaactggtactaatgatgacgtttactatattattgcaggtatgccaacaatggttttgattgcggttgctttaatgtatggatttttataccttaacaaaaaacatagagatttgtctcatatcaaaaagccaaagaggagtagatttggtaatgaaggtaaatataatattccaattgcattgactgatatcaagaaaccaggaaaacaatcataagcataactgtaaatatataaccctatcaaataactaataactctttctaataattaatcgctgcagattgtatttacaatgtatcaatgcattgaatgaaaatttagtgagttaatcaataattcattgaatctttctattctattttattggatattcgataaaatttaataatgctaaattgagttaacgtttttgaaaagactggattgtttaagctttattcagctatctactacgatcttggtcagatacgattcgtacaacttcagtaatcatgcataggtatcggtaaaccttcctaaaacagcctcaaaaggaatttttttttgtatgacaaaaaactttgttacatcaacaacagtgttactacacaattcagttttaatattattgatgtcactttttttttcttcatcaaaaatcagtaaccaagtaaacaataccctataatggatgctgcaacattattagatcattatatacatgatcttgctaatatacccgaagaaaccaaatatctgttatcagaaataggacgaaaagatgttgaatatgataaaattatgagtaaaatacaagctgcagactctcagatatccaaatatataaagcaacatggaagtttagtacgacatcctaaagaagattcactgaatgacgaaatgatcaaatattatgaggaggctagaaaaataatgaatgaaaagatattactctctaatacagcgttattgaatatttccaaatatgtttctagatttgaaagagatattgaaagactggtagagagtggaggaatagatcattgggactatgttgaggaagaagatatagatatgattgatgcaattccatcaacaggtaataaaaactcatcattcaagaatttagataaaccatatgctagatcttataacggatcaagtaacagcaataatactttcaacgatccaaagaaaataatgttatcatccaatggatcagttagtgaattaaccaaaaagatgatcaattcgtcacttgaatcaaaatctcaaaaattaccaaagaaatcatcaagggataagactccaataaatgataatgcatcaactagagaatccactccaagtatgagaaagaaagatatgagtatgagtactccaatgaataagggacctagtcgtaggattccatccggaagtggaatgggaaataatgaaaatggtaatggtgaagatgatgaactatattgtttctgtcaacaagtatcatatggagagatggtggcatgtgataatcctaattgtaaatatgaatggttccattatgattgtgttggtttgaaggaacctccttcgggtgtttggttttgtcctgattgcaggaaagatggtaagaaagattttcctaaacgtgaaaagaaaaagaaataaaaccctcaagttacttcttctgtataacttgtataattgtatattaaattagtttgtataccaaacttttgaacttattactataatatatatatgtcttctattaagcttctagttgaatataatgtttccaagtatactttaagataatctgaaaagtcattacgtaatattttttttcacctgaaattttcatgtaaatttgtaaaaaaagttttttctatcaaaagtttttaaagacagaattagcttgaaattgtttaggacaatatcataaataacgaaatcaattcaggcaatgagtggaatcactttagaaggaatattagatgatccaacaattttgtttggatataacaaaactgaaggaacaggaaagacagatgaatttttaaattgtgatgctttattagcaagtcttaaaagtatagttgatccagttatcaaagaaagtgaagaatccgttttagatgaaatttatgttgatggattagatgcatcacaagtttggggacaagtaaaacttgtttttgatggagtggaaaagagtatatggtctgatattagtgaatttaaatctaatggattttataacgaagaaagagacgaacaagaagaagatgaagaagaagttgaaagtgaagaagcatttggagaaatggaaggtagtgatagtgaagaagttgaaatgcaagaaggtgaagaagaagaagtaaattcaggaaaagaagaagacagtgaaatcgatgaaaatgaaatcgaagaagaaatagaagaggaagaaaatgacgaagatatggaagatgaaggagaagaagaatcagagaatgaacaagaaggtgatgatcactttggattggatgatgaagttttcaaccttgatgaatataaacgtcaagttcttgcacttgaagataatgatttctcagatcaagatgacgaagatgttgatttttttggagacctaagtgaagatgacgatgatgaaatgtatacatatgacgacttttttgataaagttgacaataagaaaggacatggaaagggaggaaaagataacttcaagggtaaaggcaaagctaaaggaaagaagaaagatgaagaatccgagttcttagaagaagattatgatgctgcatatgatgcagctcaagttgatttgtacggtgaagaatcagaagaagaggaagaagaagagggaaataataaaaacaatggaaaagaagaaaacttatctacatttgaaaagcaacaacgtgaattacaaaagcaaattgccgaattagaagcagaatctattgcagaaaagaaatggacaatgaaaggtgaagttagtggtaaacaaagaaactctgatactttgttagaagaagaacttgaatttgatcgtactgccaaaccagttcctgtcattacccaagaaactactgaaagtatagaggagataattaagagaagaattgttaaccaagaattcgatgaagttaccaaaagaataatctcagaattgaataacttcaagaaaagtaagaaagttgatgttagtgaagaaaaatcaggtaagtcgcttgcagaactttatgaagatgaatattcaggtaaagccaatggtaaggaagaagttaatgaagtgttagaacaggcacatgcagaaatcacggagcttttcaaggatgttacttatcaacttgattcactctattcatcacattttgttccaagaccgaaggaaaaattaatggatgttcgtattgaaacttcaactatttcaatggaagatgcacaaccattaacaatgtcaggaagtaattcattagccccacaagaaatttataaagctggcactaaaataggtaaagatgaagtttttttaaaatctggtgttgttatggctaaggcagaattagaaagagatgataaacaaagacttcatcgtgctaagaaacgtaaacaacatatgcaaagtagaacggaatccattaaaaagaataaggtggaaaccaaacaacagtgagtcataggatgtgcatttccatagcttatataaatatttacaattagctaatacatgtttcatgttcttgtacgtttctaatcattcgtcctatgtaatataattacctgaacataatgtagtataattttagttgaaaagaagtaaatagtaaaatttcaaaccccctatattagaggctcaacaagttacagcggaagcttcttaaagaatcaatagaaagaggccggttccgtacgtaaccgactcttcccgggggcgggcggcgtagcacactttcacgtgacatgactccaaattttatttttattaataattattattttcatttattactttagtattttgttacttttcataacatgaattatacttttcataaaattatacttttcattaaacataaattatacttttcataaaagagcccgttaatgggtttgcgggtgcatgaaaaaacccagctttcccatcggacaataaccaaccggagggacaaacaaagtagcactagctgacaaagccgggccaacataagcccggaatatggcagaccccgggggtttgcaaaaatttccttcccttccaattgtggggtcggaacactgtcagccatttcataatttgtggggggtttattagcttctattagtaatctgtgtacggcttgtaggggtgtagccaccccctcggagacagggatgttccttccactgggggtatgacttaaggttccggttatctggaaaacaaccccagtagaatttgaattgttcgaggggattttcataatttctcaccccttgctgaacttttacttcaagcggtttatcaataatttttcattttgacagtaatttcactgataattgatgaataatttatatgataatatagtctttagtctatgaattgacattttaggatttcaactatttaaagccctgcaaatccactttataatatctacgtgtatatatgattaatagatttctatcctcttctacttcttttttaactaagagaaacttacttaactcaaagatgtctttcgcaactgttactttcccaattatcaatgaaacttatgaacaaccaactggtttattcatcaacaatgaattcgttaaagcaaaatctggcaaaactttcaaagttacttcaccagctgatgaatctttaattgctgaacttcagcaagcagaagctgaagatgttgaaattgctgttgaagctgcttcaaaagcctacaaatcttggagatttgtcccaccaaatgaaaaaggtaaattattaaacaaattagctaatttaatggatgaaaaaagagatttacttgctaaaattgaatctttagataacggtaaagctttacattgtgctaaatttgatgttaatgttgttattgaatatatcagatactgtgcaggttactgtgataaaattgatggtagaactattacaactgatactgaacatttcactttcactaagagagaacctttaggtgtttgtggtgcaattactccatggaatttcccattattaatgtttgcttggaaaattggaccagctttagcaactggtaacactattgtcttaaagccagcatctgcaactccattatctaacttatttgtttgttcattaattagggaagcaggtattccagcaggtgttgttaatgttatcccaggttcaggtagaggttgtggtaatgccatcttacaacatccaaagattaagaaggttgcttttaccggttctaccggtgtcggtaagaccgttatgaaggagtgtgctgaatcaatcaagaaggttaccttagaattaggtggtaaatctccaaacatggtcttcaaggattgtaatgttgaacaaactattaagaatttaattactggtattttctttaatggtggtgaggtttgttgtgcaggttcaagaatctatattgaagcaactgatgaagaatggtacaacaatttcttagctcaattcaagaaagccgttgaagacttaaaggttggtaacccattcgaagaaggtgtcttccaaggtgctcaatctactccagatcaatttgaaaccgttttagaatatattcaagcaggtaaagaatctaaccttaaattattaactggtggtgaaagaattggtgataaaggttacttcgttcaaccaactatattctatgatgttccacaaaactccaaattaactcaagaagaaatttttggtcctgttgctgttgtattaccgttcaaatctacagaagaattaattgaaaaggctaacgactcattatttggtttagctgcaggtatccacactgaagatttcaacaaggcaatctatgtttccgaaagagttgaagcaggttctgtttggattaacacttataacgatttccacccatctgctccattcggtggttacaaagaatcaggtattggtagagaaatgggtcttgaagcttttgataactacactcaaaccaaattagttagagctagaattaacaaaccaatcctttaaattaattcttactgtgtctaaatactatgatagataaattatttatcatcataatatctagagttgaatttatttactagaaactaatatatccaaggggttacggatttttaacttttttatacttttgtctaaatatattttataatgattaactttaaaatgcattccatcttaaatgaatttgattaattataagcgtcgatatatagttatcgtgcaaaaaaattagttagtacccacaccacgaactcaaaaaacttcggagaaaaatcaattttcatctccgagtttttgctgtaaattccctttttaaattactaaccattgcagtgattttaaaagatccccgtttgattattgataatgaaaatattacaaacatacttttgatggatattatacacttgtactgctttaaagaaaacaatgcgtgttggagagttagcatcagcagctaccttagcggtagcaccatttatcgatcatttaatttcaacaacaagtgcagatcaatctaatcttttgaaacatttaggtggtatgggtccatatgttaagggtactgggtttggtattccatgtggttttgaatggaataccaaaccagataaagtttttatatttgctagacatggtgaaagatatccgactaaacctgttgctcgtagattaaaagcaggtatatgataagttgaaaggtgcagatgttatggatccagaaggtccattatgctttcttaaagattgggattttttcattccaggtcctgattggttaggtatggaaacactttatggtgattttaatgggtttcaaacgatgtatgattttggtaaaaatactaaaattaaatatggttatttgtacgaaggttgtgatgacattattccagttttcacagctggaaaacaaagatgtgtagattctgcagaagagtttagtaaaggttttttcaatgatgatgaagacaaagtccaatcaaatgttagaattattaaactagatgagactaaacgtatgggagctgatacattaacaacatcaattagttgtaaaaaatatgttagacacggtgaatatttcaaacatccatttattggtaaatatatggtatctgaggcaaaaaggttaaatatgttaagtccaggtttcaatttgaatgctaaagatgtttatgcattatctatctattgtgcatttgaattgaacgccgttggcgagtcaagagtttgtgacgcattatccttaaatacatttattgagcttgaatattttagagattctgaattatggtatgaaaaagctgctcatccgttatcttttgctcttggatcagtctatgttgatgcaatgttaaaattatttgatgacaaggaaacaaagcaaaacttattttttagtttcactcatgatacagatttattacattttatgaatgcattaggattatttcaatatgaaaaagaagatttaagtactagagatattgattttgctagatttttcaaaacttctgaattagttccaatgggtgcaagaattgtaattgaaagatatacaattaagaatgaaaagtacataagagtacttgttaatgatgcagttattccaattcctgagtgtcaaaatggtccattctttacatgtaagttatctaaattgaaagatattgtttatgaaaagatgcaagaatgtaatttcgttgataaatgtagaataacagatgaacgtcctaaagaattaacattctattgggattgggaggaaagaatttagaaaaaaaaaagataattcaaaagaccatttaaacattatcaaaactttccaccacttgctaatatattactttaataattgcttgttgtatagttgtatttccattgtatcgtggatgtataatatactgattcaattgatgcatatcaaaatcatattatcaaaactataaggtatatatactgatccttccttatgcataataaattttaggttacgtaataaaactggaatagctatagctcactctaagacgcgcgcagacaagtcacaattctaactttttttaaatccagacagagtgcataatatttgagagcatcaaaaaaaatagagtgtgcataaactaaaggagagacattgttttcgttttgggggaacaacaacgtcatattttatttgaatttgtacggtaaaacattacgtgtggtgtatatacaagtaggaaagtgattttattctatttttaatcaaaaatatatcattcgttgattaataatatacacttcaattcaaaattagattcatttcaaataatttatagcatagagataaatatagaatagtacagttacaacattttttaaaaccatcaatagtcaattataatgggtgggaattcaaaagattgtaaaagctgccatttgcgtatagaagagggtcaatcatataagttaggaagtgatcactggcatgttgaatgtttcaaatgctcaaaatgttctaaaatactgggagttgattcaaattttctcgttttaggaactggtgcattagtttgttctgattgttcttatacttgtaaatcatgtgagaagaaaatttatgatctggcaattctaacaggagatttagcatattgtgctgattgtttcaaatgtaaagcatgtaaaaaaccaattgatgaccttaagtatgctaggacttcaaagggtttattttgtataccatgtcataatatgctgattgaaaagaaaaagaaatatgaaaaaatgaaaaaactcaaagaaaaggctaaagaaaaatcatctttgtcacaagaacctataaactcttcaaatgaggatactagaaaggatgaaaataatcacaagcacaagcacaagcacaatcacattcacgatctcaatcacaaccaagttaatgaaacaagacctacaagtaaacgtgtagaatcagaatcttcaataggaacacaaaatcaaacaaaaagaattactggtgacgatgatacctttgaaatgaaaattggtttgaaatctaaaccttcttcgtcagtttctgagtcaagattaagtcaactgatcggaatgaatcctcctaaaatgacttccaatgttgaaagttcaagtgttaattcgaaaagttcatttcaagccaacgtatcttcaacttctacatttgacctggatatgtacgctgatacatcaaaggatagtcaaaataagagtgaaataatgaacccacacgagaacggctcatcggtttacagtagcaataatgacaaaaatagtatacaattaagtgcagatgatttaatcactaataatagtttggagaaagttgactcaagtccaatcgaaaaattagatgttcgtatggaataccaactaaaatctcctaaaactttgaaattggaacaaactccaacttttaatgactacaatgcaaatattgaacttgataataaaagtacaccaaaaaagttgaactccattccgattctgactcctcaagatgacagtgcaggatttgcttatcttcatgatgaaaataatggctcagatatgatgatccctatgagatctccaagaagagcagcattatcacctgtgagaaacactgcacaatttagaactcctgagctggatactcctagaaaaaaatcaatacctgaaaatttactttcaccagcaagtgatcatagaaaagcttatattttagatgatgataaatacgaaaaagaaccagaaagtttcattaatttaaatgagaccgaggaggaaagtttaatgagtaaagaaacaaatgataatttgtttgatgacatcaagggagaaaatcttgctaataaggaaaatgaaaatattggattgatgagtccaattaaatacaaagttgaatcagccaatcctgttacacagaatgccggtctaaatattagtggattagatcctaaattaaattttgattcaacaccggcagaacacttgaataatacaccaataaataacgatatagacacaactcccaaagatccaaaggacattacacatacaccagaagatgcacaaaatgcaacatttgataattttgataaaaatgcaacacctaactccaaaagaaaacaaattggaggtcttggacgatcattaacgaaagttttcggtagggggagaaaaatgtcaaatgatttcactaataatgatcaacttgctactcctgaaacgattacatctagaaaatcttctataataacatcaacaaacacacctaaaaaagcatatcagaactcaatctgaccattcatttatttcattcaacacacctcaaatgccacatactaaatctcataatagatcaatctcagaaagcactacatttgatattgtggaaaatgtggcatcaacagacagagaaacacgatctcttaaaactgaaatcaatgcattaactcattcaaaggctacattattgagagacattcaaagtttgaaagataagcttaaatctttagaaagggaagttaatgataaacagagagttattaaagatttagatttaacaataataaataaacaaaaaattataatcaaacgataacttatcaataagcaataattctactaattcagcaaagacatcactcaaagaagaatattatcaaattaacaacaatagtacaggtaatgtcaatataaaatacccatccactgaaagtattataccggaagaatatagtatacctagtcaaccatcaacacaaccaacatcattatctgcaacggcacctgctcaaccaatggctacatctgcatcttcaacaaactctttttaccaacaaccaggttcatcggcatctcaaacaaaggacaaacgtagtggttttatgaggagaatatttggatcacattcagcattgaatagtgcaggaagtgtacaaagtaacggatcaccagcaaatagcaaaccttcaagtgcaacgaatattagtcaacctatgaatatgagaagaaatgacgaatttgctgactccaacaatgaagtttttgagaatggtcaaccagatgttaatggatccaatgttaataaacttgatgttacgacaggtggaatgaaagcatctcgatctgcaaactttatgcaatggagaaataccaataataataacaatactaacaataattctaatgtaaattcaaatgttaataactctttatataatatgtcattacaagaattatctacagtggaggcaggaaccggagttccatttattatgaaaatatgtatgtttgaaattgagaaaagaggtatcaaatctgaaggtatttatagaattagtgcaagtacatcaaccgttgaaaaatttgaacagattttcgaaaatattaatgtcaataatgtgaatgaaattggaaaacttagagaaagtgttgaaaatattgatattaatgcaatggctggattattgaaaagatacttaaaaaagatacccgattctattataccgcaagatttctatgattcttttgttgggatttataaagttgatgatgaaaaagaaagattattacagttaaatgaaattatatcaagtttaccaagagcaaataaggttaccctttatgccttgactaaacatttggctttaatatccgataatgagaaatggaataaaatgaatagttcatccttagcaacagtttttgcacctacattaattagacacaattctctacatcctcaacaagaaattcaagataataaagctaaaactgcaattactgaattactgtttaaaaactattcaagtatttttagtagataatcaacttaaaaaagttaacgcagtatttatatcgtatcattagtgttttatattttatgaattatatagatcgtaaagtaaattttcttaagaataagagtgtagatgggattgattgcatgcattaaagtggattattaatgaacattttttattgatggattcttgtacatttcataacgtctgtttcctaatcgtagtagatgttcgatagttgcaaaatcacgacgtgacaccttcctatacttattaaattcagaatgtatgtagcttgaaccaattttgacgattttcctataaaatgtaaagcattcaatgtgttagtaatgtgtttgtggagaagattaaataatacgatgaattttaaatacatactactggtttttcatatactgatcttaagcattttctgtataaagttaatgcttccttttgtaaacctgaaaatttctttgccatcttgagtattcacgattgaagtagttaagtaagttgttcaataacgaaagagttgtttaatgttgaaaagtttccggaagtgtgcaaaagctatatccgagaaaggaaaataaattttttgggaacaggatgaacattaaaaagtttagaatctaaatgtttaactacaatatggatgatgaacatctcagaaatatatatggggaacagtttaaagattaaacagacaagatgatttttattaagttattaatataaagagtaatttatataaaaacaagccgcttagtagaaggtagttggtctctttggagcatataacttgttggacttggtaactctgtgtggaagagggaattttaaatcctttcctaaaaattgtttaatgtattgtctcttgacatcagcagtcttttcaatttcaacaatctttaagatgtggattgatctaaatcttgctctgtgtcttgcagctaaatcagcgtacatagtttcaattgcaccgactcttgagacatctctgtattccttgtacatgttgtgagtaccagatcttgaatcgtatctgatccaaacaccaaagttcttaacagtagttggctttgattcagtaataacgtttaatgaaacaatttcaccagaagccttcttaactttgtgtaatttttgtaagaagtaccagtatctagattttgcaacaacatcatttggagcaaaaattctcatacggtataattttggttctgggacagattcagttggaagtcttctaccgatgacttgatattctcttaaacggttagccactataataaataaataaatagagataaaaaaatgttagtataatgtttctttgaagatgttgaatgattatgtttaatgagtttcatagaattcatagatgagtggcagtttagtcttctaaataattttcttctatattcaataatttcagaaattccaggtttcattggtcattagttataaaacacattttggtaaatagatataagttcttaaatgaaaattctcttcaaactttaagttgatattgaacagttgtaattttattcagtttttggtattatcatttgattataacttatagaaagacaatattcaatatatcagtcaaatggtatcataataactactttcaagtgttctatgaaatatcatgcatcatgtatcatatatgttgataggtaacgtacttttgaattaatctggtttgtctggttaaaggagataattcaaaataaagtaaatgaaaatattattaataatttgaaaatagagagaatacaactaaaattggaaatcactatattagaatagagggtcaaagtgaaaagttttactcaatattattatttactggggacacccccactggaaaatttgtccagtgcgaatggtatcggtacaccccagtggcctccctcaggacgactactactttttcttgtttccgaaaagggtaatctgcaattttctgcgcgttttttttattttttaaaaattgtgagactgtgttttacaaaatattatacctgtcccatttgggtaagtgcgaggatgtaaaagggtttgtatttagatgtaagttacacgtgacagggttatgatttttatctttgcgatttatcgtataactcgtataactcgtatacattttttcactacgtcgtataagtttacttagtgaaaagagataaaaaattaaatttatcgcatgataatctcgttccgacacctgttgagccaccttaatagtatgattgtagactaccttcttattgttgaacacgatgaagcgtacgatagagcatatcagtatactactagctatatgctaaatgatatgatataaattaagatatatctcctccattctatatgcttctattaaatattcaatattgttgttatttttacttctttcattttgcatataccgttattgcactcatataaatgactgaaatattcaactcaactgtactagagacaatacaaactccatcattttttaaagtagtggaaaatgtttttgaaactcaaactcatttaaattttgttgaaaaactttgggcttcttggtatgcttatatgcaaaatgatgttcttgcaactggtttattattcttcttagctcatgaaatattttattttggtagatgtttaccttggtacataatagataaaatgccttattttagaaaatggaaaattcaaccaacttatattccatcagataaagagcaatgggaatgtttaaaatctgttttgaaatcacatttcttagttgaagttttcccaatttggactttccatccattgtgtaaatcacttggtattagtgttgctgttccattccctccagttactcaaatgttaaaagaatgggctttattctttgttttagaagatatgtggcattattgggctcatagacttttccattatggtttattctataaatatgttcataaacaacatcataaatatgctgctccatttggtttaactgctgaatacgcacatccaatcgaagttattagtttaggtgcaggtactgttggtttcccaattctttatgcttacttatatggtaatttacatttatttacaattactatttgggttattttaagattattccaagcagttgattcacattcaggttatgatttcccatggtcattacataattttgtaccattctgggcaggtgcagaacatcatgatttacatcatcattatttcattggtaattatgcttcctcatttagattctgggattattatcttgatactgaagcaggtcctgaagcaaaggctgaaagagaagcaagaagaaaagcaaaagctgaacaagctgctaaaaagctcaattaaattaaaccaatgattatatcatattcattttgtaactcatctttctacgcaaatatcttatatgaaaccttcatttctttgttcctttgactttctctttatgtatatgaaactactgcactaacatattattatgaaataaaccttataatataccataattgatctgccttgatagtaaacctttccatttgaaaacacagcccgataccaaaaaatttaatctcacatcatgctaacaaaagggagctttaagccttaattattattaatgattatctctttgtaccaactgtctttattaagtgttgcttgaataaggtacgttaactttaatttcatcaaaagaaaaccattaattaagcatcagagcaactatatactgcacaccatcataaaaatacatagctaagatggattctcaattaagattcttcttctttatgttgctattcctttggatcatgtcatctaatcctaatccagaggagaagtacccatcatatatagataaacctgaaatattgaaacaatataaagagagtatgaatatatctagaaatgcattattatcggattataatgaaggttatggaaatatttcaggattccatttatcgtatcaagatgcaatcgataacaaaacttcgaaactatatccaatttatgaattaaatcatcattttatagaagatgaaaaatacagtatactacctaactttataagtagacaagctgcaaatatatggaactcagaggatcatatagttgatttaccatcaaatagaaatgattcagaagaagctcatgatggcgttaagtataatacaggcgcctatcctttaaatattacaggatttttaaaagggaacttccaaaaatcaaaactagagaaccattcattagctccaataaatataacaataccacattatttgagaaaattatatgaatatagattctctgaaagtcaaaggaagagaaatgaacaaaacaacaacgatggttttgacgacggcaatggcgatgactcattttataccgccgagtatccatttgatgatgaagttaaaagagttggcaattttactgacgataatggttccattcgaatatctatttttaatgccaaccctatcgaagatgaatcaaccaatgttttggaacataaaataaatggtacaaccccattatccttttcaatcaaattaaataacgcagctgaaaccgatgaacataggttatcattctctggtgtatatcatcaaaatacaggtaatttagttgttgcatctaattctgccaagtttaacggtttttatgcattaccacatttacaactacaagatggcgcaaattatgaagcagcaaaatggattttattcaatgaagctaacaaaactgatattgatgatattaaatttcaggaaattgaaagtttagttgattcctcaaatgaatgtgaatatatcggatattttcatatggaatcaacaaatcttacaagggaagaattacaaaaaattgattatgaattaattaaccctgttggaagaccacataaaaatgttccagacttgaaactcactaaaggtttgttatattcaccaaattgtgcaattctgttagaagttggtgagtctgttggtttgagagatcaaatttatgaggatggattaagaaatgttatactcgttggatcaattgtgattttcctacaaattcttgttcttattagacaaatgtcccacacgaatacaccgtcgacattatcaaaactttctttttggacaattgcaataattaacatggctgatggttcactgtctgttgtttcattactttgtacaatgtttttctcagatttatacattcaatttgttgtttgtgcatttttagcattttcctgttctgcaatttatgagatgaaatatggtatacaaatttattgtacccaaattaatgaaagaacaacaagttggagaaccatgttacaaggtataacactcgatgatgcagcaacagcaaacaataatgaaacaataaataatggggcagaaattggaaaccctgaagctactgctgtacctgctgatacaaataataacacaaatactcctgtaccacctccacaaacgcagtttacaggtccagctgatgagcaatccattggcgctgaactttatactagacatttcttttcaatgcttgttttcctgttcgttttactaaatgttatcacttggcctaagagaggtagacaaatatttgaatacattatattaacaatttttaattcatattggattccacaaatctacagaaatacactacgtggatcaagatcaagtttcacatgggagtttgttttatgtacatcgttcttaagattaattccaatcatttatattgaaagttttgcaaatccttttgagcatcatactgatatgaagtttgttttattcctagttatttggctcctattacaaattggattattatttgcacaagaaatattaggcccaagatttttcttacaagataagtatttaccaaaagtttatgattatcatccagttattacgaagggggatcttgaatctggttttaactttgacagagaagaattaattagtgatggatcatcatcttcaaatgaagattcaagaactttgacttatgttactgattgtgcaatttgtatgcaaaagttatcagttccaattttaaacaattctgacaatttagataatggaaatttagataactcatcatcatcattactccccaattctactaaaactgcaatcagtaagaatgcgtctaatttaatagcacgtaggaaatatatggttacaccatgtaatcatattttccacactgaatgtttggaacaatggatggtttataaattacaatgtcctgtttgtcgtaatagtttaccaccatgttgataatattgtttatctttttttaatgtgtataattatgtttgatacctttttaatgttttgtataataaaaataaatttgaatttagttatggtgagtcatcggaaaaaccgtgtatacatgaacttcaaactcataaattttcaagtcctaaggtttggcaaagtttaacaaagaatcttcatttttaccacattcttttgagctgtttttccttctacatacatcagactaactataaatataaatgaccgatacaaatagaaagttcaaagcatgtctttttgatatggatggtttactgctcgatagtgaaaccatttacacaacttcattttctgatattcttatcaataattttaatagaaaagaaggtttaacatgggatgttaagatcaaattgcaagggttaccaggtgtgcaagcatgccaagttgtcgttgactgttatgcattagagggtgaaactacagctgaagaactatatgcattaacaagtaaaaaacaggaagaattatggccaaatgtcggagttttaccaggcgttgaaaaattaattagttatttaaagaaaaaaaatataccaatatgtgtttgtacttcatcacataaagataaatatattttaaaaacaagtaaacatgatgcattatttaaactttttgatggtaatgtaattacaggtgataatccaacaattaaaagtaagggtaaaccattaccatttatttggtggttaggtttagagacattgaatgaaaagtatggaactactattaaaccggatgaatgtttgatttttgaagatgccttacccggatttattagtggtaaaagagctggtggatatgttatttgggttccagatgagagagctttaaatgttattccaaaggaagaaattactacacaggttggagttaataacgaacatggtgttattttgaaatcattagaggaattcaaaccacaagattatggattgtaataatagagaatgatatacacaatgtattcatatgtgatatctaattagaattgtaagtagatatagattatatatcaaaacttataaaaaaataaaataggaaactgaaataaaaagcaaatttttgtaatattgatataatttatggttgttttaatttcatattgtgtatgaatttgttgattgggtgtcatatacatatagaaaatatctttatctaatatggtgcatttttgaataagaaagagattgattcaccattatgtaatcttctaattgcttcagctaaaacacctgatatatcaagagtatctaattttggacattgagaaagttttgattcaaatgggacagtatttgtacaaacgactctttctaatcttgaattgttaatatttttgattgcattaccacttaaaataccatgagtaacaattgcaataactgattttgcaccattatctaataaaacatccgcagctttagctaaagtaccacaagtatcagccatatcatcaacgataatacaaattttatcagtaacatcaccaactaaaaccattctactaacttcatttgcacgagcacgttctttatgaattaaagcaaaatttaaatctaattgatcagctaaaccggctgctctctttgcaccacctgcatcaggtgagataatgattgaatttctaatgtctatcttttctttgatatatctaacaacacttggttctgcatataagttatcaacaggtgaatcaaaaaaaccttgaatttgtgatgcatgtagatccattgtaataacatgatcacaacctgcggtttctaacatatcagccattaattttgcagtaattggagcacgagacttatcctttctatcttgtcttgcatatgggaaatttggtaaaactgctgtaattcttctagctgaagcagctttacatgcattaatcatagttaataattcgaaaactttatcattaacaggacctgcacctatttgcattatgacataaatatcttcatctctgatagattctccaatactgaataaaacttccttattagactctctcttaaattcaactggtgtaagtggtaaacctaatctttttgcaactaattcagctaatccacgatcaatatctggtgctaaaagtttgatagaatttgtagacatttttttctaaaaaaatttattgactataatgtgtaatgttttatatattggaattcaaaccgatactaacggagagatataaatatgaatctaaataaaggatggatggggggatagaagtactgtaaaggtccttaacaataagcaaatcatgaactaacatgtattcaacttcaatcaaaaatgaaaataattttttttaaaattaaatttcacaaaattcatgcaaccccggtcatttcctcaaattgtaaatttctatggggaagaaacaattttttttttataattttttttttcatttcgcgacactgaaaatgttgtgtcaaatctatgattacataatactgtacatgaaacgattaattaatgcatggcatgaaatgatgaacctaaggagtgatatatttagtgctttcaccattagcacacacctataatgtcatcagcaacagctaaaaactacaagaaacgagccatactgtatgaagatcataaatacccagaaaacagtactcaaaatggtaagaaacttaaactacctcaattattatcatataaattaccagcagatttaatgagtgagttaaatataccacaattaacattagaggaattgaaaagtaaattaaagaaaaaggataataatgaagatagttcaaatgataatgatataatagtaaaggtgaaagtaagtgaaacaatgacaattatcaaaaagataagtgatagagctgatgctttgaagaccactgcgataaaggaatttggattgaaacattatgaaatatcattagtttcctttttcatattcattcttattaacagtattagcattaagatggaatgaaattgaaaggaatgatgaaattaattataaattaaataatacgttaaataataaagaaattaattcattaattttcataattacaaggaaggaaacagattggaaaaaagttttagattatggatgtaaaataattgataatttcaagaaaatattaaatattgctaaaataaatgattcaagattatttaatgttttatcacatttattaggtttaatattttatggtaatggattaattgaactatatttaagtgaattagatttacaacatattaatttactgaaaataaaaatagggaatcataaaaatgaaaatgaaagtttaattgattataagaaaataactgatttaattgaaatttttgaaaaatatagtcaaaagagtaaagaatctttcattgatggagagaaaaggttaggattattcataattaagaaagcgtatgatgaattatttaatcaaagtcttgaaagattatcacaattaaacaaggatgaacttgtactatctagaaatctcttatttttaagtggtaaggagaataaatttaaaactggtgttaattattgtttaccaatttgttcacatacatggaaattagataatctcattaattttggaggattttttatcaaaatatggtgtgaaagacagtcaattaaagaaaatatgattttccaataaatataacttaatgaatagcatatatagtatcaaaacttacataaataatttaataagacacaaaataaataaataaaatgaataaattaaagtaaataaattattcacctaaagtatcagggaataaaaagaatgatattgcgataatgaaataagttgcaattaagtaaaactccttcaagccaatttgaactaccatctaagataagagaatttgtaatgaaaacagaaacaaaaataacggcagtttcaaacatactaaaatataaactcatttccacattcattgcccaaccaattaagacaagtaaaggagtaacaaagattgcgatttgtaaacttgaaccaattgcaacaccaattgctaaatccattttatttttataagcaacataaatagctgtaacatgttcagctgcattaccaacaattgggataacaattaaaccaataaaagttttagataaacctgaagattcaacaatttcatcaattgtaccaactaaataatcagcacaaattgaaacaaaaattgttgaaataagtaaaactaaagttgctgaagttgttgataatgattgatcacttgtaatatctaaatcataaattgattttggtcttgttaggaaagaagcagaattacgacgattattagaattaattgaagtactttcagtatttgaagatccataataactttgaggtggatttaattcatcattgttatcattgttattattactttctaaatcaacattaattggtaaattaactatttcattattagtattaatattattttcatcagagaataaataagtatgagttttcaattgaaatatcatatagaaggcataaactaataataaaacaattgaagtaccacgagataaatctaaaattttatcatttaaatgtttggttgattttggtaaagaagcataaaaagcagcaggtaataataaagccataactgagacagctaataaagaacccattgtttgagctgcagtttgattaaagaattgttctctaaattttaaaccaccaacaataaaacaagaacctagaactaatagtaaattagataaaattgaacctaacattgaagcttgaacaacagttatttgattttcctttaatgcaataactgagacaataacttcaacagcattaccaaaagttgcatttaataaacctgcaattgaatcattatgaattgattcacccaattcctcagttgcataagctaatagagaagcaagtggtataattgcaaagaaattagccaaaaatataattgaaggtgataaatggagtttttcggataatatacctaatggtacgaataataataaccaattaacttttgaagattttaaagttgttgaacatgcattgttaaaggaagtgtaaatgttttcattatgatgatcttcaggtaataagacttctgattctgaagacattgttgggtatatattcagtatggttcaatgaggtgggggagtggataagggagaaaccggtcgatgaatgaattagtatattaatttagttggaccctaaaattaatgattaatttgagaaagttggaaaaaaaaaattctcgcaattttaggtttgtgcatcggaattttcagtggtgatttctctttctttgagctgagccttcattaaataaataatagcatagtatactataatatagttagattgtatctaagctaaaagtaatgtcatatcaatgagtataaagatgttatagtgaactatagttgacaaactaactaatatcaaagtaagaaaaatcgatgatgttggtagtatgcatacaagtatgtactccttacagatacaacattgctatttacaatctctaattgtatacaagatagcaatcaatcaactaatgatactctaatccaacctaaagatgaaacaagaataagacaataagcaatgggtatctgcaagggatgaacctggtaaaggagagagttgagataaaaatataataggaacgcgctttcagggtggtgggaacgcgtcttttaaaattttaaattgggaaataacgcgtaatctaatcttttaaaattttcaacttggactttgggcatctatttcaataacgactacaaagggtaataatattatcatcaatttcataaaatctttcaccatccttttgttcactttattactggtcatatttcctctttttttaagttaattatcttctattttttactcacactccttttgattaagtcgattaagttgattattaactaaacttcactactcatcacttctttttgctttgctttggctataactctatatctttttaaaatcttttatctcatcacatttgatcttatcatatcacatctcataccaacaccaataccaatacacatgtcagatttagaagccctttacatatttcttaataaggaaataacttcagaaatggttcaatatttagttgctacaacttcttcaattattcaagttaaaattactgaaaatgattcaattgaaccaaacccattaccttataactctaattataccaacaatggattacaaactccaccccaatctccaactgaaaatgatttatcaacaattaattataaaattccatctctttataattttattaaaaaacttattcaatattctcatattcaatgtacaactttaatgacaactttagtttatttaaataaactgaaaaatgttatacctccaaattcaattggtatgattacaactcatcatagaattttcttaggttcacttttattagctgctaaatatactaatgattcaagtccaatgaataaacattgggcaacttatactgatggtttattatcattacgtgaaattaatgctttagaaatggaaatgattcaatatattggttgggataatttaagatttcaaaattatgatttaattaattcattatcttatttcttacaaccaattaaaagaaatttaagattaaaatctgaaaataatttacaaaataaaatttcaaaaattaaagcttcaaatccttcacttaatttgaataataatataaaaattaatattaatactcaaaatcaattatcagcttcttcaacttcttcttcattaccttctttaatatcatcatcctcatcatcttcaacaatctcatcaatccaatcttcattacctagaaaagattcaattcaatcaattgattctatttctaatgatgatacttcattatctccaaaaataaatattataacatcatcagataagataaataataaaaataatgatgatttatcactatcattacgtccattacgtttaaagcaaaagcaaaattctaaaaattcagaaatacccaataataaaaataataacaatacttttattaataaatcaaagagaaattcaatcaatcttttaccaattaaaacttctccaactattcaaccactttcgttaaaacatagcaggaaatcattatatctttcctcaatcaataataaccaaaacttatcaatcgttaattaatcaattgattaaatattaatactaaccaacccccctttatttgataccaatttttttcattttatttcaattcacttccctactatttacaattagtttacttacactcctatttattcttttcacttcgtctttttgagttttattttttgtaactaagtttatattcaacaactttgaaaactgttctaaattcgtcatattaacattatcacgtaaatttactatactaaatattatattaaataattttttttaaaaaaaaactaaacaaaaataaaagaaattttatttattcaatctaattgtataaatcatcctcctcttcttctgcattaccaaaatttgctccttcatttgaacctccattaataccttcaacattattggttgaacctgcaccattattagaatcagaatcaaatttaaatgaacttaattgacctcttgatgattgtatttgttgtgcatatgcttcatatcttcttaattcagatggtgaaacagatttctttgcagttcttcattgcctcttcaaaatgtaatttggaaatatatggaactggatctggttgttcctccatttcaacatctccattttcttctttcttaatcttactttcttcatataatttttgtgcttcaattgattccttaattgcaaattttgcagctctttgaacaatatatgataaatctgcaccagtaaatccattagttaatttagcaattgctctaagttctaatcctggttctaatggagtctttcttaattgtgctgataaaattgataatctaccttcctcatctggtaatggaacatatattaattgatccaatctaccaggtcttaagattgctggatcaatttgatcaggtctattggttgcaccaataatgaaaacattcttctttgcattcataccatccatttcagttaataattgattaacaactctatcagatgctccacctgcatcgcccatattaccacctcttgctttagcaatagaatctaattcatctaagaaaacaacagttggtgcagcagctctagctttatcaaaaatatctctaatgttagattcagattcaccataccacatacttaataattcaggacctttaacagaaatgaaatttgcagaaacttcagttgcaactgcttttgctaataaagttttaccagtacctggtggaccaaagaaaagaacaccctttgatggtgataaaccaaatttggtatattgatctggatgtaaaacaggatattcaacagtttcctttaattcttgtttaatatgatctaaacctccaatatcatcccaagtaacattaacactttcaacaacagtttcacgtaatgcagatgggttagagttaccaagagcaaatctaaagttatccatagtaacacttaatgaatctaagacttcagtatcaatattatcttcatctaaatcaattaactccatcttttctctaatttgttgcattgcagcttctgaacataatgatgcaatatctgcaccaacataaccatgagtttcagatgcaattttttctaaatcaacatcttctgctaatttcatgtttttagtatggattcttaaaacttctaatctaccagttgcatcaggaataccaatatcaacttctctatcaaatctaccaaatcttcttaatgcaggatcaattgagtttggtctattagttgctgcaataacaacaacattagatcttgccttcataccatccattaaggttaataattgagaaacaactcttctttcaacttcaccattagtcttatctctctttggagcaattgaatcaatttcatctaggaaaataattgaaggagcattcttttcagcttcttcgaaagcttttcttaaattagattcggattcacctgccatcttagacataatttcaggaccattaattaaaaagaagaaagcaccagtttcgtttgcaacagctcttgccattaaagttttaccagtacctggtggaccatacatcaaaataccctttggaggtttaatacctatagctttgaataattgaggatgtcttaaaggtaattcaaccaattctctaatttgagccatttgttttctacaaccaccaatatcatcataaccaacttcattcagattattttcttcatcttctctattaattggttcaccttcagaatgtattatagtatcttgagagacaattgcataatcctcaggttcaacttcaacaactttaaattcaacttgtctcataccacctctaacaatgaaatgatctccttttctaacaggtctataagcatcaacaaaataaggttttaagaaaatatcaaataatgaaccagttaaaccttcaatggtatcagcaattggtaaaactgagattcttgaagcaaatttaatatcaggacatggatgaattgaaacaacatcacctaatctaactcttaaattatttcttgaaactctgttaattctacaaacaccatcctccatatcatcatcagctaaaacaactaaaacagtatcttttctctttttacccttaactaaaacggcatcaccacggaataattctaatttttccatagtatttgaagacattgagataattgagttatcatcattggtagcatcatcaacaataagtgaatttgccttcttctttcttcttaaaattgcagttgcggtactatcttctggaccagcatcggcaccagatgcatctaataaaggttttttctcgtcaaccattttattgtttgaaaagatggataactagaaggaaataagaagaaatacaagatcaaaggaagagaaaccgtgaaggcaaatttcaagatttgagtggcaaaaagttggcaagattgttgagagagagattgataattaatttactatgagcgaagtttccacagattttaatgtgattgcttacgtatttttattttgttcattactattcatcggagtgacctctactttcaggatgttttactgctttcatggttttacttcattatatatctgtatttaacaataataatggcatctgcaatctcacacgaagcttcatgtattttctgtaaaatcattaaaggtatgtctcaattgtcactttaatctcaatcttttttactgaatctcatatactaacatttcaagcttaattttacataggtgaaatcccatcttttaaactgattgaaactaaacattcatactcttttcttgatattcagccaactgcaaagggtcatctgttagttattccaaaatatcatggtgctaaattacacaatttacctgatgaatatttagctgatattttacctgttgctaaaaaattggcaattgcattagatttaaatatcgattctccagaaggtgatggttataatattttacaaaataatggtagaattgctcatcaagttgttgaccatgttcatttccatttaattccaaaaagagatgaaaaaactggtttaattgttggatggccagcagaagatgctgatatggccaaattaagtgagtttgcaaaggaattacaagcaaaattatgattatttattttatttgatttaattaaattatattttatttcatttttataaaaaaactagttttacaattagtaatgaatgatattatgacatgattattactttttttttacctacaatcctaccatacctgtgacttgacgagctcctgcattaaaaatcatttgcatagtttgagcaccgaatgggaaataacttgcagtataccataatattgccattatttcgactatacccattaacaaacttagtatagtatttttcaatacaactgcacaataaattgtagaaatttgacttaaaacaaaaacaactgtaaatggtaaacgttccttacatgctaaatgtttaatataagctactggtccctgtaaaacaccaaatgataagaaaaataataatgaacccaatgtccataacataacgaattttcttggctttaatgttaacactgggaaaagaaagaaacctaatgcaaaacatgcaactgatcctaataataataaaataaatcctgcatatctttcaaatcttgatagtttgaaccatgaaggttcttcagtattaccaccgaatatatctgatgtattcaatggtaagacattttgtgcattatctaatgaatcttgaaatgtgttactgatatttgatccaatatttgaaaaccatgacgatgctgcacctgcaatattactttcgttatttgaacgtgtgttcctccaattggctagcacatcagcattttcggacatgttgaatatctataccccaaacaacttaagaatcaaccatcgatcccaaagacatggctgataattcaagtttttttactttgttgacattcgtcgctcggagataaatcttttgcaatggttttgtaccattttcatacgattctaagatatagataagcagcataaatactcgttaaagatggatactatatataagaaaatatacataatagataatacaaaatgattaaaagtgtttttacatcacacctgatatatagttcagattccaaacccgttggaatttggttctttgaataacagttgatccaaaaaatcagtatcattagcaaacttcaaagcaggtgcttgaaaattatggagttcattgtttaaaggatcagtttccttaccattgatatttccattgtaaatatcactatcgccttcattataaccaaaatccccaggtactccagcattctcatctcgttcattatcaaatgttaagaacgcatccatgttatcagtatttagtggattattgttagttccaaatgattcagacaatttcctaaaatccactggttcagattttgagtttgaaagatccatgaaatttaatttggaattgttagattttaaattaatgttttcggtaaatgctgataaagaatcttgaattttttcaaatttagcatcttgttcattggtcctagtagagtcatatgtattataagagttataatcattgttagcagtcgcattagctgaaccatcattataatttatttgtgattgatcatcgtttggaatttcagtcccgctcataaagtttttcacatcttgcactagattttgttcttctgtttgggtattttcaccattaaatatttgactattaggttcattcaaatctaatttttctatttcatcttctaattctgccaactttttctcctgagcttctaatatcttttgtagaaactgtatatagtcaacagttttaatcaaaataatgtttttatttgctttgatttctttattaggatttttacatttaacattatcatacagtaatgttggaggtattaaagttcctaattctttaattttttccttaatcaaatctcttcttctcctttcaacagcattatgtaattctcttcttcttgataatttactttctttacttaaagcactcttagaattaacatgtgaagaggatggtgatgccatacctttaaaacttggtgagttcattggtgatttcaaactatcatcattaaatgaaccatacggagagtctaaataaccatcataagttgatgaaggtgatatcaaattatttaatgacgtacctaaatgtgacccataacttctacctaatgtgttggacaatgttttggtcaaaaaattattgttgtaactagtggaaaatccaaatgattctggtgaaaacgtatcagctttagttggcacatctaatctatttaatgaatctgctaatagtttcgggctttgataactttcatcattcgattgcgtatcgttagctgggaacatattatcaatattatttattgaataactatttgaattattattactcaaattcattgacattatttcagagttattactgttgttcatattaccaaaattagaaatggaagttgtaagttcaacaggatcaaaattaaaatcagaacctatattatcattcattttattgaaatcaatgtttgtcgaccttgaatctttatctgaatctcccatgtggttgtttgatggcatcagaccattgatactacttaaattatttttatcgattgtatttaaattggagttatatgtcaataaactattgaatttttcatcaaataatggatcgttatcatcttgaggcataaatttgttttcagttttcactttaacgttagaataagcattttttggtgataaagtagtgccattttggccagagaattgcgtatttggagagtcaaactcttttgtattgaaataaggaatttcggtcgattctgtttcgctaccgttcatcctttatatgcagttagggtatatgtgtgtattatttataagatagtagatgtctatgtattcaagtacgagatgtagatgttcagtaaatataatttaagaagaatggtgaaggtaaaagttgcggaaaaccggtgagcaaaacagtattaaattaaggaaattttagaatttattatgtaatgcgtatattcattgttctcaagttagcatgtgcagcttggtatatataaagggtgtagtatcaacaatttagagttactcttagcatttgtgatacatcaaataattttatgatttatatataaaggttggattggccggttaaatatatatctgctatacattgatcatcattatacaactcacaaaatagttttacagcttagtgaacttttgttctgaaacatcagatgaaccaccctgactgtttccatatttagtttctaaatgagaccttcttatcatacctttgagtgaagccatacctgatgatggtgtacgattatggaaacccaaacttgattttctggtgaatttttgataaatatgaccaggtctctttttgtcttcaagatcaaaaaacatcacaacttcttcatctttggaacttactctggtgtgattggtaaaacttgctgtatcatcatctgtaataaaactttcaccttcagttgtactcatatcttctgtggttaaccttcctgtctcaaatgattcctttttatactttcttcttctgggtggtacatgtttaggtgacgtaattgaagggataatagtagattgtggtaatggtacatctggagtgtttgatgtgctattttgatcagaatcaaaatcataaacagaattcacaacattaattaattcaagttttggtattgattgatcagttgttttattcttcggcataattggaccaattcttgatattcttgattcagtggcttgttttgttgatgatgttattgaggaaagtgtttttggactatccatataatctttcaaatctttcaaattgatagagctagcactaataaagtcatcatcctttctattaactatatccaaggtagaaatactcatttctcttttctttgatctaacaggtggttgagcattttgaaggaatcttctgttgtgtgcttgtgcagccaaacttactaatttagaaccagatttttcactatttgtactttttgcacttttcaaactaccacttttagaacttccaccttcatattttgtcccagttttaccactacttgtatatgatgcatttgatggcaaactttcaaaaggtattggtgaatagtaatctgaagcagaatctgaagatatttcttgatgtaaaggtgagtatgcatttgtcgattgattatttaaatctgtttgaattggagtttttggtactcttgatcgaggtggtggtgagtttagtattgtgttttccctttttatataacttttaagatgtatatcatccgataagttgaatgtgtgattttttcttcgtctaatgatttggctgttctcataattaggaattgtttcaattgcttttatttctactgattgctctaattgtggcaatcttagaatataatcactgtctttaaaacgtttattatcaataaatggattctctgtattagttttgactcttttcttgtccgacttttcaaccttagtttcatcaaataagttggtagaatggttatcattgttaaaggtatcaaattcgttaaactcactattactgtagtcgttgctaatattttgtgtagtagagctgcttttagcattttgaataggtgaatttattggctctttgaaaacttctgttttttctgtgtctttcaaagtgacaccatgatcagattgcctttttaatttaattccatccactaaatttttattagtctttcttagctctgcttgattttcaagattttcatatttttcagctaaccttctatacctttccataactaccaaatcatattccaaaatagcatttgataaaagtaaattctttctctgttcttgttgtaatgactctaaacttgtatttttcaaatccacatcaacggcatttcttgaaaagtattttcttatcaggtgtaaccagtaaatgataaaaggttgattaacttctggtttttcttttgtggaataatcagtaaaaaaattggtttgaccatacggcatttttgcgtaagtttctcttttaatctcttgtggatcattattattaactttagtgtagttattatctccacaaagcgttggtaacatcattgtttatggagtttttggataaaaaagaagttttaagaacttaaactccaaacttgaaggaaagtactgtttagttgtatcttaaactagagagtttattttaaatgttctttccatatatgaatcatttttgttccggaactatcttatcgtgtgttctttttctgcttccttatatttctggtagccaaatcagaatattttcagattaaaaaaaagcgatgctcttgttaataagatttttagaattcatagtatcaaactaggtattgtgataaaatttttttacttttactacacctgtataatagcatgtagctaagacttgtaaagtgtacattctctgtgtccacttattgggagagacttctctctctcccttctgactgaaatacatcacgtgactaatatctatgtgaaaattttgattacctaataaaagtttcaattactaagtaaattgaaatttcagtggaaacaatattttttttcttaggaaaatgctatcaattacccaatgttttgatcagacctttaattgatagaaaaattatcgtgttttcctctacaaattatctaatattgggcatctatttgacatttatttgacatttatttctattttattttactttaaacttaacaattagccatgcctcccaactctgctttatctgggcctaattcggtgataaatcccacaccagaagactatgcagaactacaaaatccaagagaagaagcttcttatacaaaattttatagaaatctagatcctgatgagctaataccggtttatcaattttccactggtaatgtatatgaatcaatattagataattcacctgaaattgaaaattttaattatagacaagaaagagttgatcgaatacgacatagtaatttgaaaacaccaaatttcaggaaaattccaaaagatgagctggaatcacaatcaacagctttaacatctgaaatgttacctgatactaaaaataatataaataaaatacctgataaatctaataatattaatttaaatacacttgaaaaactgggatttttcaatttacccaatgataataaatcaaaattaaatttaccacaaacgtatcttagacctgatttcaataaagatcaattaactcgtgggaaactaatgtacaattccaaaaattttcaagtacaatatgatatggatgagacagatttactatttattaattggattaatgaaattgcaaaggaaaatatcacaatggaacaatttgaaattataattacattcattgaaataaagttatatcaaattgaaagattattaccaccaacaattaaagatcgttcaattattgattatcaacaacaacatcacgctttattatatggatctgatgatggtacaggatttgttgatcaagatgaacaagcatgtgcagtttgtgaatcatcagaatgtgattctacaaattctattatattttgtgatggttgtgatatagctgttcatcaagattgttatggtgtttcatttatacctgaaggaccttggctttgtcgcagatgtttaattgcacgtaataccactgaaaaatgtttattctgtccatcaacaactggtgcttttaaacaaactgatagcggtgattgggctcatgtattatgtacgttatggactccagaattatattttgctaatccaatttatatggaaccagttgaaggtgttatgaatattcctaagagtcggtggaaattaaattgttatatttgtaaacaaaaaatgggagtatgtattcaatgttcaaaaccatcatgttttgcagcttatcatgttacatgtgctaaaagagcaggcttttatatgaagtttaaaaaaggtgttaaagctgcagttgataataaaaatacattggtgagttattgtgataaacatacacctaacgactggaaagttaatcataatgttataaatggtatagagaaaacaagattatattttcatgataaaagtagagatagtttacaaaatgatgttaataatgaattaacatttgtcactaatgaagagtatgatgaattgattgcaaccaattcaaacgattttaaatggagatataactcaaatgtttatatagtaccgtcaattataatagatcaattaattgaattcattagattgaataagttaccagaaatagaaagagtaaccttgaatcagattgctaaatattattcattgaaaaggaatcatatagggaaaccattaattaaaagaccggatgttttgaaccatgcaagtatacctgaatcaatcttaacaaaaagagatgcaacaattgaatttttccaaaaagatgtcagccatttacattatttatctaaattaatagttaaaagaactaaattatgtaaatatctagttgatgagaaattagaagctgcaattttacttaataatcccaaacaatgggtgtttaacaatttggtctcatacttcaaagcacattttgttgaaattgaaaatagtacaggtatttcattgcctagctttcctaaatatgcagttaaacctacaatctatcaaatcattgagaatgcaaatgatgtaaaatatgaaagcattgaagatttgattaatgatattgagaaattttcaaattggatattaaatgtgaatttaaatattaactctccattaaatgaaattcagaagttattcagagcatggcaaagatataaaaaggctaaatatcaaaatgcaagagaatattataaattagttattgaacaatggtgtaatttaaaatcacaatttgttcaagaggatgagtgttcattatcattggcttacacaccaagtgaaagtaatattgaaaatggtgagtttgccactgttccaaaaaagaggaaacgtaaaaatggtggaaaaagaatggggattgatatatcacaagtttgaaaatggtgatttaacatcaactgaaagacatttaagaacacgtaagtctgctgttgatagtgataaaattgaagagggaaaagaagaggattatgttgataaacccaaaaatgtattaaaggcaagacttgatagagtcaaacaaagaacaaacgttcaaaatttaagaaaaactagaaggaataattgaaattagatttgtttgtattattagtaaaatgataaattgtgtaaaataaatgtactttactctagattaaaatagttaataaataggaaaattaatagaaataagaagtgttattattataaattaaataaacttaacctcacttagaaattatgtgtatataaaaggaaaatacaaggatttaaaacaaaatataaaatttagataagaaattagtaattaaaaaatcacaatccttataatttgtcgtaatattcttcgtaacctggaacagcttcctttaaacctctcttctttcttgcttcaagaacaatttgacctggtttagatgaaacatcagttggatcaccacccatagtatcccaatgatcaaagatcatttgtgggaaagcttgaccaccagttgcttgtcttaattcaccagtgaaaccgaaagattcattgacaggtaagtatgccttaacagtgaataatggagtacctggtctttgttcttcagaaacaacttgacctctctttctgtttaagacagagtaaataccaccaatagcagattctggacattgaatttcaattaagaaaattggttcttggattcttggttcagctaataacatagaagcataagtaactcttctcatagttggcataatttgaccagcacctctatggatagcatccgcgtgtaaagtaacatcaagaatgttgaatctaatacctctaatttgttcacctaataatggaccttccttagatgcccattggaaaccagagttaacgtgatccttaatttcgtttaagtattgaacagccttggtttcatcaacaacaacgttagcaccagtaccatctggaccgaaacaccaaatctttcttgcttcagtaacatcccaaccatattcatcagccattaatcttgctctgacctttaagtcggctcttggatcaatgataccgttttcaatagctaaagaaacttcttcttccattggagcagcctttaagtaaattctgttatgcttgtttggagatttagataatgcaggaattcttgattcaccttcaacggtttctctataagcaacaacaggtggagaaatctttaatggaacaccagcgtgatcgttttgtaaatcacctaaacaaatttctaaatgtaattcaccagttgcagcaacaatatgttcaccagatggggacatgtaacataaaacacatggatcggatttagataatctctttaaaccttcaactaattttggtaaatcgttaccgttcttaacttcaacagcgacttggacaactggggagactgagaatttcataaccttcatgttgtgtgcggtttcagaggtggttaaagtaccggattttaataaaaattgatcaataccgactaaaccaataatgttacctgctggacaatcatcaatttgttcaacggatcttcccatcattaaaacagttctttggatagctttaacgaataaatcttccttcttaccaacgacatagtttggaccttggattctaaccttttgaccagacttaacagtacctgcaaaaactctaccgaaagcgtagaatctacccttatcagaggttgggaccatcttggagacgtataacattaagtctgcctttggatcacagttcttaattgctaaacaatgttcatcatcagctggaccttcatataattgatcagctctataagcttgagcagtaactggagatggtaagtgaataacaatcatttccaacatagcatctgctgctggtaagaattttctcataacaaccttcattaaagctttaccttctaattctctttcttcagactttaagttaatttctaatttagttaataaagtatcaatttcttctttcttgaagttcataatggagttgattaatctgaaaattggatctaaaacgaacatgttgaaagctctttctaattgagcacctgaagcatctttatccttgtttgaccatttcttagtctttgggttgaagaaagaatcaccccataatctttgcatcatcttctctctgtcaacaccgaatttcttggaatatctagtagcaaattgtctaacagtgaaagcccaaccgtgtaaaccggaaccgaaagcaacggtacccttttctgggtagacttgacagtcacctaaaactttatcgtggtaagttgcaataacaacgttaacggattcaacagttctggagaaggtttggtataaatcttcctttgaaatttgtaattctaacatagctctatcaactttgttaataactaaaactggcttaattctttcacctaaagcttgtcttaaaacggtttcggtttggacacagacaccttcaatagtatcaacaacaaccatagcaccatcagtaactcttaaagcagcagtgacttctgaagagaaatcaacgtgacctggggaatcaattaagttaattaagaatttagcaccatcagttttttgtttaatttctttaacatcatcatcttccatttcagagaaaagggagatagcagtggacttaatagtaatacctctttcttgttcatcttttctggtatcagtgaatctagcttcaccggctttagcagcagaaataatacctgctctttggactaaagaatcggttaaagttgatttaccgtgatcgacatgggcaatgacggacatgttacggacgttggtaacacggtccattaaatctctaatttgttcaacagtgaaattaactgtaataaaataataattgaataccaatcaagttcaattcatttcatactaatggaattaatctttactttgcatcttaccaaccatctattaacataaactaatatttgtgataaccatagtttactacattaaaattccagcgaagaaaaaaaatttgcaaaaaataaaaatttcactaatatttttttcagtgctaaaattttaatatggcggtaccaaaattgatcaaattatagtgtattatgttaatgagtgagtaaagtgcaaagtaagttgtaattcttattagtagattgaagtgaaaataaaattaaggtaatagaataatgttagtatgttgaaccattttgaaagtaaatttgaaaggcaatctattgtcacaattacagaaaattctcaaattaattttttaacgttattaaggaattgtcatcagtttgagaaattgtgtaatattacaatgtgattgattttcaaggtataagttgcaatatacgtacccattttgagagttgattgaggtttgtggaactgaagaaagcagaaaggtaaaacaaaataaattaaaagaatgaaaaaaaaaaaggagaaaggagttaagtaacttaattataaattaataggcaaatggaaaaaactggtgaaatgaaaaaaaaaaatcaaattgttgtccaacaatatgaaaattttttccattgagagcgaaacttatttatttattaaccgggtaacttagtcgcgtctttgattgtgttgctattattatactactactaatacacatgtgcaagctaactaacttaataaccagatgaaaacaccttgaatggcaaaacaatatgcaaagaggcattgtaatttgattctgctctctccactaccaccacctggtaaaacaacataacgtaaactacgcatcatgaaaaatccatgtgaaaatactaataatgctaatcctaagtatcgtataacaactgaattaccacttgttatttcaataattaataatagtaatattggtacaaatttatatccagtataacttaccaggtcccataatttactattctttgatccaatacctaaaatgtaaaatgatgttcttaataatacaacatccatcatataaaatgctaatgttcttgtagttgcatatccaagcatttcaggatgaaaatcacctctcataccagcatctaatgcccataataaaatatatgataaaaatgccatacttggaatatataaatctggtgcattaacatcgtcgataggagttgcataaatatcaccttgtgcaacattaccattattattaccatttgaattcaaagtttgtctaatccaacttttatttctatatgggaaaacaattaataacagtttctttaaaacatatgcattagaaactttaaaataatatttaatatcttcattcccaacaatttgttgtaaattattttgcatatattgttgtgatgcattaaatgcactttgagaaaattgtaatcccatttgtgatgctgggtcattgaaaaatgaattcattccacctgacactccacccataaaattattattggatctaaaaccatttcctcctactggttgttgaccagctgcttgtccttgattatatggatttccatttggattaccaaattggttggaatttatattatttgtgttgaattgttggttatgtgttccacgatgttgtggttgttgttgttgttgataatgattttcatattgattttgtccaattggttgtgcattacctgctatatcatcatttgcttgagtatgatatggattgtacatctctatatattgtccttactaatcaattgttcctaatagcctagagatttacactaatagatatcagatcagtcatgaaaggtacaaactaaaatcgccaaaattcaaactgagacaccacccatcccacactattacattgaaaattattgaaaatgtcagcagcaaagacgcgtctggtttcttacgtaatttttgacgcaaaaatcccaagcacaaacacgaaaagttgaagatggattctgaaggaattaaaggtattttgtaaagtttcgaaagtgtttagttcatataataaaacaaattctaactctacatagaatacatctttaacaaaaaaatgtcctcgaagagctctaataattttaagggcgcaaattcggctcgttatgttaagaataaacaaaattttaatggtgataataatgaccgtgataaatctgattcaaataatgatagagcaaatccttttaaaaaaaattataatgacttttcaggcagaaacaaaagtggtaaatcttttgaagaaatagaaaatgaaaagatggttcatgttagaaaagttaataaaatagactccatatttgggtttgataagtttgaatctggtccaaagagaaaaggttggttaagtaatatgcattccaccttaattcaagatgatgagcttcattctcaattatcctgcgttgattattattttttggatgaagaaggtggatcttttaaagtttcatatcaatttgctccatattttttaatcgtttgtccaactgataaagaaattgcattggaagaatggttaagaagaactttagaatcaattgttaaaaaaatatcaactgtcaagaaagaagatttagatctagataatcatttaactggtaaaaagagaactttagtcaaactagaatttaacaatatatccgatttattaaatgcacgtaaaattctacagccaatgataactaaaaataaagaaaagaaagaaagtaatgatatctatagatctgttaacttgaattataacaatataaataaagaaaccatagaaaatgatgatcttcttatggatatagatgctgatgaagaattagattttaaatataatgatgcctctgaattgatgttggatatcagagaatatgatgttccttatcatgttcgtgtatcaattgatgaagatattagaattggtaaatggtatgatgttgaagtaacaccatcagaaacaagaattatagaagataaagaaaaaattgcatttgctgatccagtggttttagcatttgatattgaaacaacaaaagctcctttgaaatttccggtctcttctgttgaccaaattatgatgatttcctatatgattgatggtgaaggtttccttatcactaatagatcaattatttcagaagatatagaagactttgaatatacacctaaacctgaatatcccggtgaatttatgatttttaatgagccaaatgaaaaagctttaattgaaaagttttttgaacatatacgagatgttagacctactgtcattgcaactttcaatggtgatttctttgattggccattcgttgaggcaagagctaactatcatggaattgatatgtttgaagaaattggatttgcaaaagatgcagaaggtgaatataaatcaagttattgtactcacatggattgtttccgttgggttaagcgtgattcttatcttccacaaggttctcaaggtttaaaagctgttactactgctaaattaggttataatcccacagaattagatccagaactaatgacaccgtatgcttatgagcatcctcaattattagctgaatattccgtttctgatgctgttgcaacttattacttatattataaatatgttcatccattcattttttccttggcaactattattcctttgaatcccgatgaagtgttgagaaaaggtacaggtaccttatgtgaaatgttgttaatggttcaagcttataaaggtaatattttacttccgaataaacatacggatccacctgaaagattttataatggacatttgcttgaatcagaaacttatgttggtggacatgttgaatcattagaagctggtgttttcagggctgatttgaaaaatcattttacagtcgatccaactgctgttgatgaagttattgctgatttaaaaaattctcttaagtttgctattgttgttgaaggtggaaagaagatggaagatataacaaattttgatgaagttcatgatcaaattagagatcaattgttgaaattgaaagaaaatgttaaaagacatgaaactcctttaatttatcatgttgatgttgcttcaatgtatccaaatattatgacaactaatcgtttacaacctgattctatgaaatctgaagaaaattgtgcagcctgtgattttaatagacctggtaaacaatgtgatagaagattaacttgggcttggagaggtgaatattatccagctgaaatgaatgaatataatatgattaaaaatgccactttgagtgagctgttcccacctaaatatcctaatggaccaaaaaggaaatttgaagaattaccttatgctgatcaagttgctcatttaaagaaaaaagtttctgattattcaagaaaagtttatcatagaataaagtgtacagaaactgttgaacgtgaagctattgtttgtcaaagagaaaatcctttctatgtagatactgtcagagatttccgtgatagacgttatgatttcaaaggtttagcaaaagtttggaaaggtaaggttaaagatattgacccatcagataagcattcaattgaagaagctaaaaagatggttgttttgtatgattctttacaattagcacataaagttattttaaactcattctatggttatgttatgcgtaaaggttcaagatggtattccatggaaatggcaggtatcacctgtcttactggtgcaacaattattcaaatggctagagaattggttcaaagatttggtagacctctagaaattgatacagatggtatttggtgtattttaccatcaagtttcccagaagagtataattttaaacttaagaatggtaaaatttataatggttcatatccttgctctatgttgaattatttagttcatgaaaaatttaccaatcatcaatatcaaactttagttgatgaagaaaaattcagatatgaaataaaagcagataattctatcttttttgaagttgatggtccatataaagcaatggttttgccaacatctaaagaagaaggtaaaggtttgaaaaaaagatatgcagtttttaattttgatggatctttagcagaattaaaaggttttgaattgaaaagaagaggtgaattacaattgatcaaaaatttccaatctgatatttttaaattgtttttagaaggtgaaactttagaagggtgttatcaaactgttgcaaatgttgcaaatagatggttagatgttcttgatacgaaaggtaagatgttggaagatgaagatttaattgaattgatttgtgaaaacagaagtatgtctaaaaagttatctgaatatggaaatcaaaaatctacctctattactacggctaaaaggttaggtgagttcttgggtgaagaaatggtgaaggatgcaggtttagcctgtaaatatattatatctcaaaaacctattggtagcccagttactgaacgtgcagtcccaacaaccattttcttctctgaaaccagtgttaaaactaaatatttaagaagatggttacgtgatccttcattaacaaactttgatccaagaactattcttgattggacttattatagagatcgtttagcatctgttgttcaaaagattattactattccagctgcaattcaaggggttaaaaatccggtaccaagagttgctcatccagattggttacaaagaaaaattgcaataagtaatgataaactgaaacaatcttcattaagtacatttttcaaaacagcacccaaaggatctaaagtgattcttcctcctcaagatattgaagatattggtagtttggctgcaacagatggtaaaaaaatagctaaagttacatcaaagaaaaggaagggccaagagggaattacattagaagaagaagaaaaggctatcttttatggtaaaatgcctgatccattggtagattatccagcattcttgaaatatcagaaaattaagtggaacattaaagcgaatgaaagggagagaagagaaaagatatttggaagaggtgatatgtcaactagttcatcgtttgcaatgagtaatatcatgaaaaatcaagctgaaaattatttgaattcaatttggcaagttatcgaatataaatatgatccattacatccagataagttaaaagcatttgtcattatatctggtaaactacaaactgttcatattcaaataccaaagaaaatttatttaagtttcaaaaataatagagaatttcctaaagataagattgatttttgtgaagttactaaaagtaaaattactttaccaaatagttcatctgatgataaaaatatttataaattagagatgccatataatgtatatgaagaagaaatgagcaagcctgatagtattttaaatagtactgatgttgaaggaatttatgaagctaatatcaatacttcagaaagaggtattattgagttaggctcatgtatcaaatttgatgaaaacaagggaagccaactgatgaagtcatttgaaaagggtttttcacgtcatgatcttaaaagtttaccatctgatggttatttaagtagatttactatgggtgttctatacttgctccatattgtttccaattcctatgaaatttttacaattttcaacacttcagacaattctgcttttgtttatattcttaaaccatcatcaggtgcacagcaattaccaactaattttgaaagtgtttataatgaaatatacaatgcaaagaaagaaatgattgaaaaatattacagtatcattgattataaaactgatgttgtttttgaaactcaatatttcactgatacttcaaagatgtacaaaaaaattaatgcaaaactaacaagcattactgctaattctgcatctaagatggttttagtcattcaatcacctatggctaaccaattaaaacaagtttttaaaacttcatttgatcttccaactattggaatgggagtttctgaatttcaagttcaagccttaacttggcattcggtcattatcaagagaattgtcaatcattatttatcacttgcaagttggattaaaaaattaatggatttatcaaaatactcaaatgttccattatgtaatttaaatgttgataatattggatatttaattgacattagttattctagaagattaatggaaaataacattatgttatggtggtctaaaaattcaaatcctgattatggtggtgcagaaaaggacagtttcttatctactgttgatgaatcatcacaattcccagttttcaataaacctgaaatgtatgaaactgtttgtttagaaatcagtgttaaaaatttaacaattaatacaattatgtcatcttcattgatcaatgaagctgaaggtgttttcattacagagaatggtgataatcataattcaacatttgcagataatactttttcaggacctgcattatcagttttaagaggcttaattcaatcatggtgggatgatgcaattaaagatataactgaagcagatgcattaatcagttcattcttaaaatggtgtatgaattcatcatcatttctttatgattcatcacttcattatcatatccttaatttaacgaaaaaatcaatggttcaattattaaatgaatttagaagaatgggatcaagtgttgtatttgcagatagaaataaaatcattgttaaaacatcaaaaacaagtattgaaaattcatatgcatatggtcaatatgttatctcaagtattagatcaaaaccattatttaatttattggaattaagtgttgtaagatattgggatacacttgtttggatggataaatacaattttgcaggtagttatacatggaatgttacagattcaactactattgaagaacagggagatatggttgatgattccacagagaaaaataaacttgagtatgtttctaaatggcaaattaagaactatttaccaattatattgcatgaagaatttgaggattgggttttaatgattttagatgctttgatcaaagatagagagaagagttataataatggagattctaaggaaaatggtacacagaaaagacaaacacaaattacacaaatattaatgcaacaaaagaaagaggaggaagaagttgatattgaaaaaattaacaaagaaggtttatgttcacatttccgtaaaccattactgaaaagaatcaatacattaattaagaaacaatctgatacaatcagagatgctgatatgattaaagaatttgaattccctaaattagcaggttcacatttacatttaacagatccgacgttagaattagtcaaatatatttgtcagatattatcattatcaaagaaaagaaatcttgaagttagattattacgtcgtgatttattaaaactatttggtattatggaattcagtgaggaaggtatgtttagaaatccatcaacttcattagttattcaagaagttatttgtgattcatgtttacaaattagagatattgatgtatgtaaggaagatgaacaaatgatatggcaatgtccaaattgtgaaaaaccatatagtaagataattatggaagagaaacttatctttgaatttaataaattacttgttcgttattttacacaagatttaaagtgtaataaatgtggtgaaatgaaaagtgatgaattatccaacaattgttcctgttcaggtaaatgggttaataccgttaatatgaaagatattactagaaaattccacattttcaacaatgtttcagatgcttatcaattaggactattaagacaagttgtcactgatgttatttaattcatataacctaaatatatagataattagattaggaaaaaaaatagattaaaaactataaaatatgaaatactgtataaatataaaagatgtgtagatgtataatacaaaactaagattaatatctttcctttaatcttgaggcaattgttcttaaattaccataaactttaccaggaggactacctaaaatcaaactcataacagcttctctagccattttaatatgagtgaaacctccaagaatatgaatttttgaatctgcaagcacaattctagttctagttgcattttcaattgcaaatctagttctaccatctttaccagcaatacgaccaattgcacgagataaatgatcaccttgtaatgttttaacgtctttaatttcaaaagattcaatatataaatcatcaagtcttaataaagcaattgcatcatcaatatcaaaacctaatgcaaatgctttaataaaatctgcacctttttgtaaagcacctggatcagttgttttcttacaagatcttaattctactgctctactctttaaattcattctaacttgaagttttaaatattcaactaatggaggatatattttagaccatgaaccctttaatggtgacattctatgtggtggaattggaattttacgactttcaagtttaactcttttacctgaatctgcttgagattgaaatttaggtttccccgtttcatctaaaactaaacctgcactaggctgccttattttagattcttcttcattgttattattatttattgtttctatttcattattatcgttcatattggtgtcaattaaaatttcttcagttggttgttgttcattggatactacattggaaatttgtgtatttgcagttggtgcaattctagcagatgttggtgcaaccatgattgataactattctaattctataaagtgatctaactgatctatttgattataataaacctaccctgttgaactgataaagatctgataaaatttattttattttctgaaaaaaaaaattttataatttcttagtatagtaaaagagagtatcttagaaaatagtaaatttttcaaatcagtgcaccgtaattgggtatttcataatttggatttgaatacatgaattaatgtctcttttataaaggttagtgttcatctttgagtgcttcaaacggtcaggtaatcatcatgttcccgtttttgaaaagtgtcggtttgggaataggaaacagatggataaatttcagtaaaaactccattaaaaatcatcaaataagtaataatatctatagaaatggtatattaagatcaataaggtatcaatcaacaaatacgaaattcacagcagataatttatttacatcaagattagaatcattagagaatcatattaataaagaatttctagaaattgataatattaaaactttagataataatagaataattgatttttataattcaattgaaaatttccaacgtgaaatttatgattataatcaattatcaccaaatgataatatatttataataaaatctaatgaattattgaataaattattaaatgattccaagacaaattttaatgatgaattattaaggaaacttttcattaaacaaccattatttccaactttgaagacaattattaatgcatattattctaaaaactcttcaaatcatatagattctaatattgcaatgataccatttagaaaactaatttgggatgcacaatttcaacatgcattagattatgttgaattaaccaatggtaataaaagatatattgaatataagaaaaattcattatttaatattttaaaatattttggtggttcattagttggattaattgcatgtattcatggtagtataagtgtttttttccctgaattaattgaagcaggtacaggtggtacatcatttggtatttatggtatttatgcatgtattataacgtattttgttaattgtggatttttagcaggtttagcatttagttcaaaaggtttagaaaatggtaatttaatgtttaaacaatcaacaatgccacatgattggtatttaaaagttgatcaattaaagatgtgttctaaaattgttgaagcagattcagaaattaatggtattgatggatttgcaacgagagatgttgttaaaagagttcaacaaatgggatttgaagttaatgaacctgaacaagaagttatgttaagacaatattggtattcatcaggtgaaggatttatgtgggttgaacctgatattgatccagccgaaattgaatggtggaaacatttagataatattggtgttaaaaaagtttgggatcaagatttgaataaaattgaacaagctgatgcaactgaagaaattaatgaaaatgaaaatgaaaatgaaagtgatgataatgataatgatgcagaattattattaccatcagataagaaagattaaattagaattattaatttatacaatctgtatataatataaaataatgttactgtataataataattataattttaaatatagtgcttgaatatttagaaaaaaatgatgattttttggaataataatagaagagagtaaaaaaaatgttttccaatatgccaattgaaaagaagaaatagataagaccaataaaataattgaagaaaaatgaatttgaacataaatatatgaatgggaaccaaatgatttataaactaatataatatataatataacaaatgaataataagattaacattgtactattacattgttaaatttgaaggtaaatgaccattacctaatttatcatgtaatttatttcccttagttttattgaaagatttaccacttaaccaaaattcaagtacataattaaagaaaaaatcatcttcattattaaaagcatctaaaacttgttcaattttattctttaattcaacatcatttctagctaatccttgtaataaagataaatatttatcaactggtgcatttgtttgattattcgttacacttgaaaatgcactaaatccaggtatagattttgctataaatggatttgatgatgatatagatgatggagatatactattaccattaatagttacattaatcgttgaagttgttgaattgttttttgtaattgatgatgatgatgatgatggtggggaacgtcttggatttgaaccagttcttgaaattggagataatttagtacttaaattagttatatcattaatagttggagtacttgccaatggaaacattaaaccattagaatattgatttgataccagactatttaaattattaaaatgataaagattgttcattttataatttataacattattatttgatgagaattcaagattatttgaattaagattaaaaaaacctttcctttgacttaaaagataaagttcatctaatttatcaaaaattttagaacctttatcaaatttatctaatctggctaataaattagttaattttgtatcatttggagaagaaattgttgttgctgatcttgtagataagcggagtggagatttgcaattcttaggagtttttaaacgaagaggtgaaagggaatttttgagcatagctgtagatatggagtgtaataccttgaagagacagagagagaagaagaagaagtagaagaaacaagagaaacaaaagaaacaaaagagaaagaaatggttcaacacaatcaatcaatcaatcaatcaatcaatcaatcaattcatcaactgtaagttatcggtcttagtcattaaatacagtataataagcttctagtctttaaattaataacgccctcaaaatttatttgtggcgcatgcacgacatgtggagtggcgcagtgtgaatgattctcggaccattattaaccagattggaatcatccatcttcatcgagattggatcatcctggaattttgatctggagggtatcagtatgttcttcctttgtcaatggtttatttagtattgctgcgtcatggagaatcttcctttaataaaggatcaagattttgtggttggattgatgctccacttagtgaaaatggtgaaaaacaagcaattgaaactgctaatcgtataatggaagatcctttaacaaatcatattccaattcatttattagttacatcaagattaaagagagctattttaactgctaatataatattagaacaaatggatagaattaatatggatgtaattaaaacttggagattaaatgaaagacattatggttgtttacagggtaaaattaaaaaagatgtattaaatgaatatggtaaagaaaaatatatgttttatagaagagcttatgatggttgtccattaccaattgatattaatgatgaatataataaagatactttaaaaattgcaaaatttgataatgaattaattgattatcctgatttaataccaaaatgtgaaagtttaaaaatggttattgaaagattaaaacctttttgggataaggttattataaatacattaaagaaaagggaaaatgttttatgtgttactcatggttcagttgttagagctttattaactatattatatgaattaactgataatcaagttgaaaatttaaatatacccaatggtatgccaatattaattgaattagatgataaaactcttaaaccatctagtagtacatggacttatttagatcctgaacgtgctaaaatcgaagcagaaaaagttaaacatgatggtattcattaattaattaattaattaatttatatcgtttctataaaagtttttaaaaaattattattctctatataaagttttctctatttaacaagacgaccagcgtttgttttcccaatttttaacagtgtattgaatgttattttgtaagacacccttaggtttaaaacatcttttattaaatgttgtacaatcattcaaattacaccatggcattattttaccattttccctaactaatgaaccatctttaataaattcatctttaactttgatatacattgatgatgtattttgttcaattgtgaatgaatcattacgtggctttaaaataactgttgaccacattttatccctcgataaaagtgaatatttgaccattgcttcaagatttccattattttcattagtgtttgaaatattattttcattatttttattgaaatgtttattgataaattcatcaattgttgaacaatttgatgatgtaaattgattttgataataatcaattaaattttcacataataattgatcaggataattaattttaattgatgaatcaattgaataaaatctcaaaaaaattggattaattctacattctctttgtctgggtatattaataaataaattatttgaatcgagatatgaattattattattatcacttacttgtttataagttgtttgaaatgtctctaatgcaacttcatcatggaaaattaaatttttagtttgagcttcaattattttttcaactgtaacagtagtagtgatatttgatgtagtattatatttgtaaaaagattttgcagatttgattaatgatgaatcttttattttactctttaatgaatggaaaagagattttgaagatgtgccttcagatgataaattctcaacttcatgaattatttcattatcatcatcatatagagattcaccaagaggatgattttcaacattaaattcacaatttaatgaagaatgggtattatttgctttttcaattgaattaattgataatgaatcagatgtaagtgaaggaattgaataacatgaggtagatgacatatcattattataatctaattgaaattcttcattaacagtgggtattgataatgaatttaatgaaaaatttggtgatgaagttaattgtggtggtgaagaatctaaaggtaatgaaattgatgaaagtttagatttattatttttataaagagttgatttctttttagttaatacattttttaaaattggtgaataattacttgaaatatttgaagaattacatgaagtaatatcatgattatcattggataaagtacaattatttgaagaaactgaataaactgaaatatttgaaacttcagtaactgaaataactgtatttgtagttgaaagtaacgaaaaatgtaatgatcccaacatgattatgagacttatacaacagttaagtcgattggtaaaagaaagaaatgattgggaatttgaaaaaattaaagtaattggggagtgttataattggggattataggattataggattatacttactaatggtactccaacggtttgaatcattttccagataacgccaattgtgtcaaattttttacagtgaccatttcaccaccttaaattgtcgcaaaacttacctaattgggtatttttaccacactattacacggaagttccgagttttcctatggcaatattaattttagttttgttttttctaattttatactcttttgatgccttgtaacttcaagggtgggtatattaattactaatataccactcaataattaaaagaaggcttaatgtttatattagtagtactactacaatttagccttagatgtagagttaatatacttagtaaataaaacaactgtggttaaataattaacttgctacggaatgctcccgaattaaaccgatcttatgttgctatcagtagtttgacacattttgagctattttttcttagtttactgtgagaaattatttgagaaaaagccactgattttgttttttttttctttgcttaaaaattattactattctgggggaagttctccgttaactgtgaggaaaaaacttctattttcgcttatagtagctgttttcggaacctgccattttaggaagttccattctgttagtgccctctaataaaaaagccttggggcactgaattaagtgttaactgaattttatgaggaaactaaaaatattacccctaagaggaaataatttatccttaaagtataatattttgattacgtaagatttataattataattatattagctaagcgtagagtgtatattccattctaatctatttataacttgtttgagaccatcattgaaattaataagaaactaatatcatcattagaaagagaaaagtttgaattacaacatcctgagaaggaatttttcgagtttaatctagttattgaatattaatgtaaaaatatttttttttccatagtaaatttactaaaaaattgtttgaaaaaacacgagaaaggatcataattaacacaaatttaaagaataccaagtattttttctagatatagtgactttgtcagttgttacatctaatcgtatgatatttaaattggctatttaatgtcggtttgggtgtgttgtaatgcctatttaatctaaatgattactattatagggaagtttacatgcattgttataccgagcatcccacgaaaaacacccccaaacgttctaaaaaccaagaatttgcttgtttattacgtaatacaattaatatgttctaaacgccgctataaaaaacctgcgtcgatgagtcttgaaaaattttatcggaaactagaatcagcatacatgcacatgtgttgtaatttaatgatcaagacacgttgaggataaaagtataatccatcatcaagtaattgtttataaatacttgattttcatagttttacaaatacttagatagttttatctttcaaaaaaagctaattaaaacattcaaacctatataacccaagcattgtcaaatcggatgatgaggatgataaagaatattcctgatttaacagtttattcttttctgctgttgtaaatctgctttaaacaggctagaatttagcatcataaaacgtttattaatttttaaaatcttaacataagttgatttaggaattcaatggactgacagaaaaaagagtgatgggctgtggacggcgataatgagcggaaaacagggatataactaatagttagatagcctgtcatttcagatatcgtgtttgtcaccaaatgacccatcaatttctgaaaccagtaaaaattcggacataacacacatttcccggtacaggaccatcccaggatttaaaaattactcagctataagagctctaaagaattattactacttatagtaataaaacattaaccgcaataaatccgaaacccaccgacttattaccgaaaaaagccgcacattgcctaatacagtaatcgcggtacagtcaccatggtttcataaattgataaagtttaactaacattatacccagcccagtaaaaaccaatatagtcggagtgctgcattaacgggggaatgatgggaaacccccatcaagataaaaaagctttttcccctccttcccccccctttccagttccctctaccaaatgaagcgaaaaaattttaaattaaattagagataaagtaaaatgaaaaaaaaaaaacagactaggcactagtgcaatcaagcgatggaatgaaccgtttcttttttcttgtggctgttgaccgtttttttctgggaagaggcgcccttttttgaccttgctatttccactatctcccacttttcacatttttcttccccttgccacatactcttctttcctacctttgatctttacactacatccttctctgctactgctttgatttcatttaataactcatcgtatttatcttatcatatagattaatattcacaacaaaattcacaacaaaatctacaactaaaaccttttctttctttcatcttgttcactaaaattaatctcctgtttttttgaaattacttagataatgaaatctttggctagtcagtgactgactggtgctcctgttgatattataaataataataacattaataataataatatcgatatcaatatcaataatatacccatttctaacaataataataactgatttaaatatgaatatgaatataaatactactatgaataccactgttagtaacacaccaaaacttttagatatactaaatgataatgttgatcctgattctactcattcaaaaattaatttccttgaatttttagttaagaaacattgtattgaaaattatgaatttttctctgaattatcatcaataattacaaacttatgatacttttcaaaaaatataattcaactgctgaatggttctctctttattataattttattgaatctgaaattattaatttacctgcaaatttaatttcaaatttatctaagaaggaattacctgaattatcttacttaaagaatattgaaaaaattatattgaattatttattagcaacatattatgaatttttaacatttacaaaatctaatactaattctaattcaaattctgctataaattctaatacaaattccaatgttaattcaagatcaacatcattttcaaattctgtatctacatctttcccaacctcaacaaatgaacaaataactatgcttacagttaataaattaaattatgatatacgacataagttattactcaataataataataataataatagtcagtttggtatagattcagatgatgataatgatgatgattattatgacgatgatcataagctgataaaatcgtatcgtgaagaagaagataaagaagataatatacaattatatgacgatgatgatgatgatgaaaatgggatacagataggaaaaggtaaggacattaataaaataatttcagaaacaactaatagatcaatgtcagcatcattatccaattccatacttaaatcgagatcaccatcaccaataagtcttaataataataataataattttgttggtaaattagctaacagtagtaataataataatcataataataataataatagtaataataatacagtcattacagattcaaatagtataatatcgaattcatcatcatcaaattctacagtttgtgaatcatgtgattgtgataaagaattaaagaaatggagtaaattcaccaagaaattaaaatggagacgtaaatccagcacaagtacgagtacgagtacgaattagatattatattagatattatattagatattaatttatagaataatttatatagagaaaaacactaagaaaataaaataaaaaatagaaaataaaataaaaaatcgaatgacttttcttaaactgtggggcactaagctttaagtttaacagtgagggacccttattagataatttttataagattacgtaatatttctcaatcttattccactgatccttcactatacacagccccctatttccctcttattattatattgtaaaatataggaggggggtatatggagctggagatggatatctcttcttagattagcttttagttaagtgatagatagatattatcagtgacattacaataattagttgactcttatttaaacttaattattccctacctatatcgatgcactccacttgataaattattattcttttttttttcacactctaaagtttcactcttattttacatattagaaaaatcaaacacacatatatatatatatatatatataacgtacataaacttcaaatgtcacttaaattaacttattattgtccatttgatgaaactacaaaaataattagagttccaagagaaacggataatttatatctacaattacatgattcaaatgataaattaataaatccttctaaaatttttaaattttcaaaatgtaaaacaagtgaaccatccgttcatcgttcaattcatcaatataatgattttaattgtttttataaggcaaaagatatttgggaatttgataatattggagtttcaaaaccacctccaaatattaaaaatgcggaatttattaaagttaaatcaattgaagatggtgaagttcgtaattactgcaattgttagatatttagtttgtggtcattgtgataaaggtgctttcggttttggtggttatttattagattctgaacaaagggaaaatcatgttgaaataggtttcgatttatcaactgttaatccaaatgatttaacttatttcttctattattaatgcttaatgttattttcactttactttacttacttactttactttacttaattttttattttacttttctctatgaataattttaatgaataataattttttttaataataatatggtaatgataataataaattataaaaagaattataataaataaataataataattataataaatatagaatgaaataaaagatttaaaattgaaattaattcatattaatttaatttgcttgtaattgtttcattctgtttaatgcagaacctgccttgaaccattcaatttgttcttcattgaaagtatgagttaaagtacattcccatggtttaccttcctttggattaacaaccatagtaatatccttacctggagcaaagttatctaaaccgacaatatcaatttcatcatctgggttaatcttatcgtaatctgcattatccttgaagtttaatgctaataaaccttgtttctttaagttagtttcatgaattcttgcaaatgatttagtaataattgcaaatgcacctaaatatcttggttctaaagctgcatgttctcttgatgaaccttcaccgaaattttcatcaccaatgacaacccatttgtgaccattatctctataccatgcagcagtatctggaacaccaccccaagcaccattatagtgattttgaacagtatttgccttaccattaacaatattaatagcaccaatcatatagttgttagaaatattttgtaaatgacctctgtattttaaccatggaccagccattgaaatatgatcagtggtggttttacctaaagctttaattaaaattggcattttaagtgcatctttaccatcccatggtttaaatggagttaatttttgtaatctatcagaagttggagcaatttgaacttgaactgatgatctatcagctggtggtgcttgataagtgttttcacctgcatcataaccctttgctggtaaaccttcaccatgtggtggttttaataagaattcatttccattagcatcctttaatttatcagttaatgggttaaatcttaaatcacctgcaattgcatatgcaacaaccatttctggtgatgcaacgaaagcgtgagttgctggattaccatcatttcttgcagtgaaatttctgttgaatgatgaaacaatagtattcttatcacccttcttgatatcttttctatcccattgaccaatacatggaccacaagcatttgctaaaactgaaccaccaaaatcttggaaagtttttaagaaaccatctcttgcaatagttgctctaacttgttcagaacctggagtaacagtaaataatgcctttgctgctaaaccatgagcctttgcatcttcaataatagatgcagctcttgacatatcttcataagatgagttagtacatgaaccaattaaaccaaccttaacttctaatggccaatcctttgcaacagcaacttccttcattttagaaactggagtagcaagatctggagtgaatggaccattaatatgtggttctaaagtgtttaagtcaatttcaataacttgatcatatggagcaccttcatcagcagataagtaatctttcttgtataatttagcaaattctgcaatttcagatctttcagttgcttctaaatatttaaccatagattcattgaatgggaaaacggaagtagttgcaccaatttcagcacccatattacagatagtagccataccagtacatgagaaagtatcaacaccatcaccgaaatattcaacaatagcaccagtaccacccttaacggtagtaataccagctaacttaagaataatatcctttggagaagtccaaccagacatcttaccagttaatttaacaccaataatctttggagcctttaattcccatgggaaaccagctaaaacatcgacagcatcagcaccaccaacaccaatagctaattgacctaaaccaccagcatttggagtatgggaatcagtaccaataagtaaagcacctgggaaagcatagttttctaaaacaatttgatgaataataccagatcctggtttccagaaaccaatgttatatttagcacaagctgaacctaagaaatcataaacttctttatttaaagagattgctcttgctaaatcttcaggaccttccttttgagcttgaattaaatgatcacaatgaacagttgcaggagttgcaacagatggcataccagcagacatgaattgtaaaatagccatttgagcggttgcatcttgacaagcaactctatctggtcttaattttaaatatgagacacctctttcaatttcttgactttctggtttatctaaatgtgaatataaaattttttcagcataagttaaaggtctatttaatcttgccttaacaatttctaaattcttaacattttgtttgtagttaatgaaggtatgatcttcatgaatgttcatatgaactttagaatctttggttaaaccagttgcggtagctaaaccacgagttcttgggactctagcaattgatcttgcggataacattgtagatagaggttacttaagggaaacaaaatcaagaaagaataaacgaaatggaaagtaaaaaagaagagaaactattactttattattgaaatcatcaatttaattaaaaattggaagaatgcttttaatttaacaacacaattaccaaaaaaaaatacaatattgaacatttccggaagggcgagcgaagacggacttcggatccgtacacttttcacactttttcatccaaccagaatttaaggatttgtaagtatctattacagtatttggtgtatgtttggtgtttgtttgaatgttttatgagttttttaactggttttctataccatctaacactactactacatagttagcctactttgaatgattataacaccctctagtgctactgttatcttataaataagggctcaaaatacacataaccgagatcggagtatgtgaaattgtatgacgcgtgacgtttttcaaaccatttttttattgtgtcagcaattttcacattgcgttgattcgttattttatgagacatttcctaagctaccgatattcggctttgcaccgccaccgagggattttcttattttccaagtttttttatcgcaccccatagtggctggtgaaataaacctttctttttctatatttgtggcgcagtatattttaatcacattgtctcctctttgcggctggtgagaatcaaccctttcacaactaagtaaacttcccgaaaattccggtaacgacattcactaaaggcagtagtagcctccccctagtaaaatgattttagcttagtatatcagtaatggtataataatttcaatcaactaaggctgggttactttagcctttactaccatcattacagccatctattcaattcaattccagtggtaatttctttatatacattccacaacgtacgatattagcttgttgtaccattaatgtcattattaccatcattatatgacatgttcattacattgataataccgtaatacatgatggtggctcgtcaaaattaggttatctccccataattttaagaaaaatctgagctttttttatcaatttctcattttcttattttctcgaattttccttctagtaccttctagaaatctatttatcatacccttttcactttaaaatgttaatgagctgtcctattttctgttatcacttcactttcttgaactattataaataagtcaattgttatcctttaatttcagttgtttgtatcccaactttagttacctttgaattttttacaattttcatttatttattactttaaacaaacaaaaaagtaaagactgtattattataaaaactatcatatcaaaatatggattcaactaaatttacagatagagcattagaaataataactaatgcacaaaaattatgtcaacaaaatcaaaatgttcaattagttcctttacatatcttagctgcaatgatacctgataatgaaagtcaaccaatatatttaaaggttatcattgaaggttcaagatatgaatgggaacctgttaaaaggttaattaattcaaaattattaaaattaccttcaacttctggttcaaatatggaacctggtatgtcatcttctgctgcaagtattttaacaaatgctgataaaattaaacaaattcaaaaagattcttatattggtcaagatcatatattatctgctttattagatgattcttcaattcaatcattatttaaagaattaaatattaaagttcaatcattaaaagatcaaatcttaaatttaagaggtaatcaaagaattgattcaagacaagctgattcatctgaagaatttgaatttttatcaaaatatgcaattgatttaactgaacaagctttacaaggtaaaattgatccagttattggtagagaagaagaaattagaagaactatcagagttttagctagaagagctaaatcaaatccttgtttaattggtgatcccggtgttggtaaaacttcaattattgaaggtgttgctcaaagaattgttgataatgatataccatcagttttacaaggttgtaaattatttgcattagatttaggtgcattaaaggcaggtgcaaaatatcaaggtgaatttgaagaaagaattaaaggtgttttaaatgatattgaaaaatctaaaattatgattatattatttattgatgaaattcatatgttaatgggtgatggtaaatcagatgctgctaatttattaaaacctgcattagcaagaggtcatttccattgtattggtgcaacaactattaatgaatatagaaaatatattgaaaaagatggtgcatttgagagaagatttcaaagaattgatgttaaggaaccaactgttaatgaaactgttgcaattttaagaggtttacaaccaagatatgaaattcatcatggtgttagaattttagattctgctttagttgcagctgctcaattagcttcaagatatttaacttatagaaaaatgcctgattctgctgttgatttgattgatgaaactgctgctggtgttgcagttgcaagagattcaaaacctgaagaattagataaaaaggaaagacaattggaattattagaagttgaaattaatgcattagaaagagataaggatgcagatgaatcaacaaaggatagattaaagcaagctcataaaaagaaacaagaattagaagaacaattacaacctttaagagaacaatttaatcaagagaaatcaagtcatgaagaattaactgctgcaaagagaaaattagatgaattagaaattaaagctcaagatgctgaaagaagacatgatactgctacagttgctgatattagaatgtttgcaatacctgatattagagcaaaaattgatgaattagaagaaaaagttgaaatggaagaaaattcacaagaatatttagttaaaaatgttgttggtcctgatcaagttgctgaaactgctgcaagattaactggtataccagtctctaaattaactcaagctgaaaattctaagttaattaatatggaaaaagaattatcaaatgctgttgttggtcaaggtgaagcagttaaagcagttgcaaatgcaatcagaatttcaagatcaggtttagcaaatccaaatcaaccatcatcattcttattccttggtttatcaggttcaggtaaaacagaattagctaagaaattagctggattcttatttgcagatgaaaaggcgatgattagaattgattgttcagaattaatggaaaaacattcagtttcaaaattaattggtactactgctggttatattggatttgaggaaggtggtatgttaacaaatcaattattgagaaaaccttattcagttatattatttgatgaaggttgaaaaagcagctcctgaagttttaaatattttattacaattattagatgatggtagaattactgcatcaaatggtacattagttaattgttcaaatgcaattattattatgacatctaatttaggtgctaattatattaatgaatcaaatgttactaaaattacaccagaagttaaaaatcaagttatgtcagttgtttcaaaacatttccgtcctgaatttttaaatagaatttcagcaactgttgttttcaatagattatcaagaggtgcaattgctaagattattaagattagattagctgaaattgaaaagagatttaaagaaaatggtaaagatttaacattaaaactagatgattcagcattacattatgtttgtagacatggttattcaatggatttaggtgcaagaccattaaatagattaattcaaaatggtatattaaatccattagctgttatgttattgaatggacaaattcaagataaggaaactgttaatgttactgttgatggtagaggtttacgtgttattccaaatcatgaagcaatcgataattcaatggatgttgatgcagttgaagattggactgatgatgcagataatgatctttatgatgatgatgttgaattagattgattctaattagctttcacttcttatttaaatttgtatatattcgttaaactttttttagatttcttttatattttacaatttaatgaaattttttaattataatttaagttttcttttaatattggtagttagtatagacttttacccatgacatataaattgttgtgttttttaaaatatttctattttctaacctgctttagaagtatttgttgcatgttttattactctataacatcaacagtggtgttataacgttgttaacaagtataataagttatttggtaactgaaaatctaatgttatttttttacgttttgaatatttttacagaacttgtgctattcaatcattaaatctcaaaaaatgaatttttgtacactacaacctaatttgatatcataaatcatttaagcatacctgtacaatttgatacgtcccaagtttcaatcaaaacgacaaaagtattgatgaagttatacttaattgaaattgtagttgaaccgagcccccaacattttatataaaattgatttacaaaatgtttacgcatatagtaaaaagttgtttctacatattcaaacataattaatattcataaatacaggtataaatctactcatttatctatattgttttcatattaactattcaatatagtacatgtaacaactactagtaacttcacttacccagctcccaagttgataatagaacccatcataattttgattagctcgttccgcgatttcctattgtgaaaaataaatttggcatgttaacttctaataataatattgtatgtgatggattgatacaaatcttaacatacttccatatgaaataaattaattaatttattttcttttatattactttaatagaatagtcttattaacagacgagtaactaagtttttaattaaatacagttagtttggttatcaattgaaaaaagaaattgtttatagattgagggaaaaatgcagtactttggtagggcaattggatcagtttctaaaacatggaattcaattaatccagcaacattatctggtgcaattgatgttattgtagttgaagatgagaatggtgaaatgagatgttcaccctttcatgttagatttggtaaatttcaattattgagaccatcccagaaaaaagttaatgttatagtcaatggagagataacggatataccaatgaaattaaatgatgaaggtgaagcattttttgtctttgaaacagatggttatgttcctgaatatttaagaacatcacctgttgttagtgctaaaagttcaccatcaaattcacctagactcacatcaaattttaatagtaatgatgatttagaatacttggatattggtgaaggagctaatgattcaactattttgacatcacctaaaaaagatttaattgaaagaatggaagatgggaataataatgacaataatgataatgataataatgataatgaaaacaatgataatgataaaaagagtaatgaaagcattgataatcctgggagcgaaccactatctagagcaggcagtatgtcaccagttgaaagagctagaagtattacaatgaaactgaacataccatcaaaagttgaagcaaatggtgatattttattagatatgcatggatataagagtgataaaaaggatatacgtgaaactgatattttagttaaacagttattacaagaagaatttggagatgatgttgatattgattcaattatgaatacagatttagagggtaatattcgtattttaaatacagagggattaacaccagaatcatcattaccatcctcacgtttagattcatcatcatcatcattaccatctacagtttcaaataaagatagtaatatagctcaaagtaacataccatctcctgaacctttaaacatcgatgaatctaatgataatatcaatgcaaacaaaagttttgatagtgaaggtaatgagaaaaatcatgatgttcatttcaaaacattaagattatcatctgaacaattaaaatatctatcattgaaatatggtgaaaatgatataaaatatagtgttaataatggtaaatcagttgttgtatgtaaactgtttttatggaaacgtagtacaccaattgttatatctgatattgatggtacaattacaagatccgatgcgttaggtcatgttttaacaatgttaggtagagattggacacactgaaggagttgctaaattatttgatgacattgaatttaatggatataatataatgtatttaactgctagatctgttggattagcggatacaacaagatcatatttacaaggtgttgagcaagatggatataaattacccaagggaccagtgatattatcacctgatagaacaattgcctgcattaaagagagaaattgttttgaaaaaacctgaagttttcaaaatggcatgtttaaatgatatcagaacactttattatgcggataaagtaaatccattagaacatgatcaacatcatatattatatggatatgaaacaggtggaagtgaagaatccatagtaaatgatggtaataatgatgaaaatagaggtgatagaggtgataatgatgaagatgttgatatagaagaaggtataaatgatggagatgaagaatatgatgatagtaatttaagtgaatttactgatataaatacgagtactgatccatctaaacaagggaatgaacttttaaatcaattagagggtatgaaattagattctgttgttgatgaaagtaatacaccattttatgcagggtttggtaatagaataactgatgcaattagttataggaagtgttggagttccatcatcaagaattttcacaattaatccagatggtgatgttaagatggaattattagaaatggcaggatataaaagtaattatgtttcaattgttgaattagttgatcaattttttccaccagttgaaattaaaattggtaaagagaatgaattaagaaatgatatatcaacaagtaatggtaatagtataagtggacaaatgtcaatgaataatgcacgtaataaatatactgaattcaattactggagaaatccagatattgacttatcattaattagtgatgaagaaagtgattcagctgaaggtgttacagctagtgatttaagtacaagtaatcaaataaggattgagattaatgatatgaataataatgatatgaataaaaataaaactgatagtatgaataggagtattaatttacaaagaggagagtccatagaaaaggagagtttacctaagagaagttcagtatcatccagggaaagtagtgaagctaaaggataacaaaggtgtgaatggtgaaatagaaaaagatgaacttaaaagtattggaagtagattgaagttatttccttagatcaccattatcatcaccacagaaggaggatatactgagaggaacaatagatagagatgataataatgatagagtttcactacattccgattcagattctcgaattgatatggatagaggtgatgaggagagtgactctgattatatttacgaaaccagtggtgaagaagatgaagatgaggaggatgatgaagatgaggaggaggtagattccgaagatggaaatgatgatatggagaaagaattgaaagatttgaataataacgatattaatactgaaacatacagtgatgtcaattccaaaactacaggtaatggtaatgttgtaccgccaactccgccaatacgtagacaatcggaagcggcaattaatgaaagtccagtacttgggaagtttgtataaaaaaaatggtacaaatgtaactacaacatttataacctataagatagtatgcatagttgccaaggaaggacaagaaagcaatttggtgtattatgcaaagtgcattagctaatgtccctttactagtaactaaatactactaaatatactctattatatagtattttgtgtaaatatagtataaattactaaaaatagcaactttaaagtttaaaaagtttatgtgacgtaatagtttttcattttccaattttagtatttttagtatttttagtattttttcatttcttcaactcagtggaagaactctttctcttattagagagagtagatattgagtcgatgacagagtgtataatgtttactggtaaggtagtaagtatatactttgaatgtagaaactcaaagagtgtagtgagtctgtatcttgtagcaaacaagcacacttggtagtatcaatatcagcatttcatttgttgtatcggtggaatttgagaccaaacactattttatagttattctattttttacatcccccttttctaaaactcccttcactggaaccttcgtatttgattcactatatcatttttctattaatacactacaacctttgatttttgttttcgatattgttttatctcaggttcctagtagaagttttttatcaatttgtattgtttcatatatattgattgatcataaatcatactatatcatcttctacatcttttatcttaatactttctttattcaatacaatcaagtatttctaaccaaggtgtttatgcttacttatgggatccgaatttgatctggttgaagacacttgtttccataatcattccgataacgccaccgataattatcataagatgatatctcaaaatatagatattccgaaatcaaaggatagttcatcaatcaatagtaattctcaaaatactgattctattactaatactatcactaatattaatactaactctaactctaactctaatactaatacaaatttcaatatgaacaataatacaggccattcaaatacaaagacacataaaaggggtgcagcaaattctctatttaattctgattcaacacttgtcgataatttctctaataaggtaacaagaacaatttctgaaaactccgaactttcatcttcttcatcttcaattcattcttcttcaactgctatatctcataatattcagcatttatcctcaaatacttctccaatatttacgtcatcttcaaattcaaatacagtaccccagtctcctgctctttctacaataatgattcaagaagagagtgaagaagatgaaaaagataaatttgcaaatgattctttatcgaaaaatcttgataatacaaacctcaatgcaatgataactaataatagcaatagcaatcacaataacaagagcaatagcaataataatcataatacatttaacttttttgagactacatcaacactgtctcatcatcatattaaaaatccgttgaatacaaatagaggtttgttaaatcgttcaaaatttcatggtttgggccatagaactacaaaaagtgaaaatttcaatacaaacttaaagaaaaatttatcttccatgaaaaatataggaaataattatcttcctcgtagagatactaatcaacataatgtcacaactgaaaatcatgaacataatgattcacgtaacactagttttgaaattaataacaacactaagagtcgaaatactctaaatctttcactgaatcttacacctaacaaaagttactttgatccaccaccttctgctcctgctgattcccaaaataaattcacatttttagagaataatgataataaaaatacagaaaataatacatctgaggatcctaatcttagcaaccatccaaatattttcataaattcaacaccaatgtcctctgaatttaatttctctaatatttcaaatactacaagtagtcccatgtcttcatcttttaaattaattagcccaattgattcaacttttaaattaaacaattcaagtaataattcattaccaactagatcaagtgcaaaattcaaaagtaataaaataaagataccagaaaatgttacattattaaagctaaaagattctcaaagttttattcaagatttcatgaaatcaattggttcagataaacttccaaatttactgataatcgatgtacgtcctttccatgattattgtaaaagtcatatatccaactccatcaatatttgtttaccatcaactttattgaaaagatcaacttttactttagataaatgtatccatacattaacatcaaaagagaaaaaattgttcaccaattattatgaacgtgatagtaaagatttaccatcagttttattttatgacgattctgtatcaacagaggatagtatctcatcatcaatttattatttagtagataaatttttaagaagttcaaattggaattcatcattatacattttagaaggaggttttagaaaatttgatcaactttacaataaagaaaataacgataaaaatctcaaagaaagtgataataatgaaaaatcttcatctaccttaagctcattattacataatgatcattcaacaacatctgttaactcatgtcttttttcacctatttcaaacctcatttctccacattcggtaacgtcacctgaaaattttaatagaaacaataataacaatgaattaaacccatcatcaataacggaattaaatacaaaatcatctaataataatcatgcaagtaaatctccaattggcttatcaagatttttattacctgatacatcaaatatacccatttttaaaaccaaaaattatgatgaagttttatcggacgttgtcgatacttctattcatttagctaatgaattatcaccatctcaaatctccttattacctaattggttaagtcaaaacataggtcaagatcttggatcttcagaattaactaagaaatttaataaacttcaattacaagaacgtgagagattatcgaatactttacatggtcataaaaacaatccagtttcaacaaaggatcatcctattatatctgctggtgttgaattaggtaggaaaaatagatataaagatattttcctttatgaacattcaagagttaaacttgaaaatgatttaacaccttcaaatgaaaattttaattattcaacttatattaatgcatcttatattaattatactagatcaaatttaaattatattgcaactcaaggtccattagatgaaacaattggagatttttggaaaattgtatatgataacaatgtaccaattattttttcattaacaccacaatctgagaataatattgaaaaatgtgctccattttggaatccaggtgtttttcaatcaaataatgttagaattgaaactgaattaattgatcgagttgatgatttaaaattatgtggtatcacaagtgcaaaatgtattgcacgtgtatttacaattaaagttgataattcagacattgttaaaaaagttttacaagttcatatgatgagttggccagattttggtattgtcatttgtgaggaagatattttaagtttggttagtttgaaaagatatatttatgataaactaaatataacagatgctccaacattagtccactgtagcgcaggttgtggtagaactggtagtttttgcgcaattgatacatgtattgatgttttattaaaggatgaagttgaacatgtaattgaaaagaatgatttaattttcgaaattacatcaaattttagatctcaaagagtttttatggttcaaacgtctaagacaatatattttaatttatgatagtattattaaatatttacaaatgcatcataatgctgatgttaatcataaagaagtaagggataaaaatggtgatctattaacaaataaagggttaattaattgggaagttagagatcctgggattttagggaaatttatagaatcatatatttaggatatatatgataatcaaatctatataaaatcaagtaaattaaattaaaagttcaaaactatatgtaatttataaaccaataacatacgttttataatataagtactaaaataacaaggtatattttctctttcaaaattaatttttttccactattaaccaagtactagttcatacaatataacaattatatttacaataattaatggaatccttagtaacgtacgtgttgcactaattaaattgattattcttgatttaatactttcaccattacttgtattaccaccattttgcataccaaaatccccatatccaaattgacctgcactgtttaaattattatttgttgaatcagtcccagctgtccatcctatacgtgagagaaatctatcttcacttaatattgcaattccattaatgaaaaataatatagctatttaaacaaaaaaaaacatgttagtaatctgggatgaattttcgtttatatttaatgtatcacataccataaaagagcgttccaattccaaacatcactaccttttccagtaaatcaaagaaagagttgagtttaaatcaaggtaaggtacttttacatcaacagcttaaacattgtaatggttggctaatcattcttaaatcgcgtctgggaaagaccaatttttttgtctctctggtctatgactactataactagccaaaactattaggtcacgtgatgcataccctttgaaaaactgtgattactcaggaaacagaggccaaaacctcagttgagagactggaatagcagacattaataacaaggatatagaaagctattaaaaaaatataaaagaaaacttcaattgtttaggaaaatttaccgccaatcatacccttaattgcatcattctttgcatcagaaatcattttatcaatatcatcgtttaaatcacctaaatatgaatctacattattttgtgcaatttccagttgattagaggcataatcagtaacaccacccagccatcctgtaacaggtttagtgttaacttttttcttaaaatgtcttgttggagtttccattaattgagcattttgatgaattgcattaggattaaaataaattggtttagctgtacttatatacgtgtaattagctggattataacatgaaacttcccatgataatgtagattcctctgaatttgtctcatttggtctaggacgtccaattagtaaattataaagttgtgggtatgtaacacttggtgtatttttaagcattggatttgctcccggtctccatggtactgtgatgtttttaaggaataatgtatcagttgatttacttgtttccaatgacataacaggtgttctaatcttcattatattaacaagagcagcttcagtttctgtgattcttatgaaaacatcaccaagaggtaaaatggaactttctgatgcatattttgattcaattctgtatggaattctaagatttgacatctcagctaatgatggaatagttaatgtcaagatctcctttgaaattccaagaataacaattaaacaaaatgcaacttgtccagttgttggagattttgcaccagttataccaacttttgaaacattacccttattgaaagttttatgtgcaatcttagaattgtttttgagaactctaatatctgattttagactgatgaaataacataaggatacactctgtctgctgtaatatctctctttaaatgttctaaagttggaattgcaggtctaccagtttcggaattcacaactgtaattgaaacaatatcttcatcattgcaatcaatttgctcaataaatttaactctaaaactaccttgtaaaccacttatctcatactgtaagaattctaccaatatttgtacccacatacattaatataacccctctttcattactttgtgaatgaacaccataaccaaactcaacacaggtaggctttacaggaaggttcaatcccttatccttcaaaatttcattatgtatgacagtaccagaacgacgatcaattaataataatctacctgattcataaccaattaaaacaaatcccagattacttgaacttattgcagagactttaccattatttaaggattttaccaacagttttggtaaaaatccctttttgatatttcttggagttcgatcttggatattgattagcgctttaccactattttctaatgataaacttgacattttaccaactaagttctcattatttttcggatcataagccttattcatttgatatgaaaataaaagaacatctccactatacaaactgcaggcaatttctaaagtttcaggtgcaaatgatatactttgaacactaacactttcatcatcttttaataaaaactcagaaatatcaatttcaaaaattttactactatccaatcctccctccgaggaatcccataatctaataaacccattctcatgaccagttataattaaagatccagcatccgctttatatttaggacgacaaggtataccaccttttaaaatagaatctggtagttcatcagcatttttaactgtattcatactattcaatatacgacggtcaagatatgatgatgatgaacatgtaattttcggattaagccaagaaatagttgatgggaaatatttcgctttcatggatctatgaccttctggatagtgtaagaatttcattgaaccatcattcatgatgacagaaattagttttggatcatgacatccatcaaaataaggggaagcttcccctagtggaacaaagtcaacaattgatgcagatgagtgaatggcaaaaattctttgttcttttggttgtgaataatacttagccatatgcgcataagaagataatgaataggagatcatctttccaaagctcattcttattaactggtgatacccatccgctgaataaccgtcaccacctaaaattaaaagagatgttttttctggattttcttcacacaaccacttgattgttttaattttagtcattctattcttactgaccttttgctgtttaccggttggtttatcaacatcaacatcaaataatgttcttgccaaaatcttttcaccagttttagcatcccaaaatacaatagagttgtcaacataaacggtaacacaatgtaacccatttggatgccaaacattatgtaaagcctttggatagtaaaaaccttcagcattatactcgtacatcgaattttctccaccaacagcagttttaggtagttgataaaccaaattaagtttaattgcattttctaccagattatagaccacagtaactttagggtatgagattagcaaagttccaatatctcttggatgtatcgatatacttacaacttcatgatttccctctagcctgaaaataggactttgttgttctcttaaattcaagattgtatctttaccagtttcaatgttaaatgctctgactgaaccattttttagtccaatatagacaaattctaaagagtaatcacaagcgaatgaagttataggtactttcgcaacacatgtgtgaatcacttttttagttagtaaagatatgacaaagatagaatttgatgaatccacagcaatcaaatagatacccttaataaattttaatgctcttattggactgacagattcaagattaaatgatacattaacacgggactgtccgaatatgtaaattttattgaaatttgtaatcaccgccattaaagattgtgttggatcaaatgctaatgtttgtatattaccaactataccatattgttgtagttcataaactccataaggaattgcttctaatccagatgataaattttcaccagaccggaacttccctaatgaaatattaggagttttgaatgatgttttctgtgaatttttgttcatatctggagaattaccaaaatttaagttaggacttgcaggatagtagtctctggtatcgacatcatctgttttcctggataattttttaattgacctcaaagggtttatatttaacagtgctgtaggacttttaggctctttagattctaatgaggtagagctatttgtaaaatctcccaatgtaacttcatcaacagatgaaccagctcttgaacgattcttctttttactccatggagaacttaaatttaagtttaaatcgggtgtaccgttcttaaacatgttgctatggaactatatattacaaacctataagtatttgtaaagaaagaggtaaatgaaagcttcaccaagaaaataaagtgaaaatcaaattatttttgtgaggttcctaacttttcagcctccgagattttgtacatccttgatgatatacttcgaattttgaactagttttagaccaaagtatatatagttttaagtatattgcgttcttctttaataaagaatttgaaaatttacagaaaaaaaatgctcttctagtttgaatcatacagaaatccaatcaatggcattgatttttggaaaacgatttggaaattcttagatttaactattgcatacttgtttttttggtttagtttcgtatagattaataattatgttcgaaacctcgtttgaaatactcgtgaaaattgacgtgatcttgtttgatgttgcatcaagaaaccaagctcgatataatattagattctcaaattattaggacaattccctttcatggatcttacagagatcaatctatcatttgaatctatccaatcaagcaaacagattccatcaaggttggtaaaaaaacaaacgagcaaatacaaccaacccctttcttgaaaaagcatgtaacatatttaaaaatatacttcgacgagaagctaatcaaaaatgaagtaatattaaacaaaataataaatatcttaacaaacatttcaaatgaagtgtcaaacatcataaatgaaaaataccaaacaagacctaataacaagtatgcgatggttaaaatacaatttccaaaccatttcccaaaagtctatgccaaagaggcaacttacagagcactttcaaagtatggtaaaatcattgaactttccaccattcaaaaacaaaaaccaattaacacatatatttcaaggaatgctaatcacccaacacttcactatgtactaatggaactgaactcaatctcccttacacctccaaaggattacatctcatttgttaatggtgacagaacttcgaaacatctttcagtaccttatgacagagggctattgtttcccccatgctcaacaattaatgtaacagagcaaattaaaattctctctgaagtccaaaactggaccagtaactgaatttttttggtaatagttatatttctataatacttacgtaatcctatgaagttagagtacaacattaggttgttagttatttaaattattgttccttatagatgaagtattgtttggttctaaaggtagatatgctggtagcagaatccagcatcattttacaattttaatcaaattatagatttacaaggtataatataaataaaagtatacataagaagtatttaaatgttataacataataagtagagattaaaatttagaactagctagtagtgatgcagcacttttggcatttatatttgccatgtcatcatttagatcatctttaacatttgtgttatttgaaggggcaggttcaagagattgctttttaactcttgaattccaagaatcttgttgtgaacttgtgatatttttattttgattacttacattatccggtaagtattctcttccaagtctacccaatgagtcttgctgattaatcaaacgattattgattaatgagtttaattttttacgttcctgtataatttgatgctttgccagaattttaaataatttctttgcactcaaaaccatataatccagatattcctttgattcaattaacatttcataagtagttcttttaacttgaaacctcagttctttttcataattatgactcagttctaaacctcgtatagcttcatcaactttaattggatcaattgcagatttcatttttaacttttctattacggcatgtttcttttttgttgcttcttcagcacttattaattctctcataagtaaatgtctatttgtcaatgattctttaatattgtaagtatcatcacttatttgtttaaaaaatccaattaattcagatgttaaacttgcattcttaactaagtctacttcattaaacatcagagagaatttgaaaacttttttccataattttgacatttcttcatttttttcaatgttttccatatctcccaggatattaataaattcattattataaaatgctgtttgtctttgatattttaaatatttttctaatttctccaacagtttttgacaatttaaataaacttctttaatgagtggtctatatcgagccaaataatcacaactatcatacggaggttgaaattgtttcaatgtttttcttcttaacccagttgcaataatagaattagtcgatggttttgttttagacgatacataactgaaatcattttgttcaaagaataatgcgaattccttgtttttaataaggatgggatttgagcaaattctatttaaccaatcttgaaatgaatttgttacagatgaaacaaattccgttgacattggtgagtataaagttgaaattgtaggcaatgatggaacgaaaacttcaatattattatatgtcaaatatttgtatagtgattcaaattctttatatgttctcctaacattcttataaatatctttacggaaaccagataatttaacaacttttgcattgaagttgaagattggatttttctgtgaattgctaccattagcttcaatttcttgaattttaattatcatttggaattcatctttatgtaatctttctggtaaatatcttcttaaatcattttcagttggatattcactaaattctgatatagttgatgatgcagttgtagcagtgtttgaattagtattttgatttgcaataggtaatacagaggtttttgaaattgaggaaccagaatctgtaccattgctagattcatttactacattatcatcgccactttcattatctgaatttgagtgaactgattcattagaatcattttcatcatcttgatcgtggaatgcagatgagacagcaccgttgtcggcaaatggattgttatcaaaatcctcaggatcgtaggatacagcagaagtcattcttgtcaaaagaagaacaaactgtacttagagaataaaaaaatggcgacagaaagataacctgatcttatttatatatactccaacaccaagtatactctatactgtgatgcaatgtatacttccttattgagagaatcagtgtctctaaaacgccacctgccactaaaataaatgattgatttacagaacactgtgaaagaatgagaagcctccatgtacaagtcgatcgacgctctttgttgaaatttcgtgtttttcagttgatgtattggctctttacaaggatctgttggtgcatgcataaacatgaagtatgtagatcagtaaaggaatttcccgtatttagcatacaaatatacactgtcaacagtactgtaacggtagatccattttatatatattatttagttaaaaatggaattgttgcagaatttggttagtgcacctcaaactgccactgaaaaggaagttgacgacaatatcatcacgttggttgatagattagcacattcaactttagtttctgatagacgtagtgctgttttatctattaaaagttatagtcgtaactatagagaaattgttattgctaaaggtttaaaacaattattcataaccttacatactgataattccgatcttgatatcgttaaagcaatcttagaaatattgattattttattcattcgtggtgaaggtaataaagatttaacaagagattggattaatactcaatcaagagttcaaaatggtaaatatccttctccttcaattttaattcaaaatattaaacctgatcagttttcactttggattgctgatgaacttacacagagtctatcaaatttagaactattaattgaagtattggaatttgatgatattcacattaaaatatattctttacaattattacaagcattagtatcaactagaaataaaagaactcaagaattgattctaaagtctccaactgcaatatcacttttatgtcaagttttggatgatgactatgaaccgatcagaaatgaagcaattctactattaatgggtattgttaaaaataatttcaatattcaaaaactagttgtatttgagaacacctttgataaattatacaatatcattgaacaagaaggtggaattcaaggtactattattgtgcaagattgtctttcattgatttcgaacttattaaatttcaattcttccaatcaaaaatatttcattgagaccaattgtttacctaaattagttcatcttattgatcaatgcttaagtattacatcattcacatggaatgttcagagattagataatttaactactactttagaaacttgcagattatttgttattaaagatactcaagatatagaagattctcaaaatgctatccttaatagtggtgtaatgttatcatgtttgaaattagttttttctttaaacattccaaatgaaattagagttacatcattactaactgtttcagatattattagaggtaacaacgaagctcaattcaaattctcccaagtggatgttccttatttagatccaagtttacctccctctgcacaaaaatttgaagaaattgtcccaattacagtagcactattaaactggtgtctttttgttaactctgttcatacatttgatattagagcagcttcttcttacttattacacgcattttttaaaaacaataatgaagcaaaattagctttcattgaagatcaagagttcacatttaacgttcttaacggaattacaaatttgtcagatacagaaggagaacctaatgaaactgaaaccgatgaattatcacctatagataaattagataatattcttaccaaaagtcacagcattgataatgaagaactaaatgatactaaaagtgatgaaacaaccccatcatcagttgaaatcaataaactggagtcaaaagccaatattttccaaactttaattcacgttgaaaattttaagctcaacccttataaaatatggtttgcttccgtcattttactttatatttttgaagattctcctgattgtaaatctcgtgtaatcaaatttatcattggaagtgcagatgatgatgaatcagatgaagaagatgaagaacaagaagagcctcttttattaatatctgctactgcacaagcactatgttcttcattgaagcaatctgatatacgtgtctctattgcttatcttatgctactttcaaattggtgttttgaaagttatgaagctattgatgaaattttaaaagactcctcaattttggatcaattacttgcatatattgtcgatcctgaagcaaatgatgaattagttcaaggttctatttctttatttttatcaattatttatgaattctcaagaaaagtatccccaatacctcgtttgcaattatttcagtatttgtcaaaaagagttggtgtacatgcattcagtttgaaagtccaacaattcattaaagatccacatgtttctgaatttaaagaatttgactggttgaaaccttctagagacgattctggtttacctgaagtgtatttcgaagatattttcatttatttagtacacgataattctcaaagattaattagtgcaataggtagagatcctaacattgagcctataaaaaaacttgactatgcagcatacgatcagttagaagataaacttactctattatctaatgagtatatcaaattcaagtctgaatctgaagatctttccaaaaaacagaatgctcaaattgaatccagtacatcggagtttaacgagctttccacaaagtacgaaacaattttaactgatatggaaaagttggaagaagaaaaagataaactgctaaccagcttatcttcatctgttacagaagtgaaaggtttgaaggagttacaaaagacattggaaatcaaaatttcagaattgagtaaaaaattatctgaatcttctacaagtttgaaatctatggaaaatgaaaataaacaattaaaggaaaatttgaaaacaactgaagaatcaaaaacagttgctgaaagtggaatcaataagatgagtagagaactgatgaacttaacaaaggagaaagcagctagtgaaaagactatcaaatcattagaaaaagaagtaaatttattgaaaaagaagttagaaactgttgagttgaatttaacaaaattaactgaaaccagtaatgctaatattaaaaacttagaaacacttttgaatgataaatctacagaactgaaaaatcttcaaaccactcacacaactttgatatctaccatgaaagaaaaagatgacaaaattagcaccttatcaaaaactcaatccgatttgatctctaaactgaaatcagctgctgaaattattgaaaatctaaaatctcagaaagacacatctaatacagagttatcgaagtataaagaatcactatcaatggaaatcaatgaattgaaagattctttaagtaaaattaatgaggagaaggccaaattaattaatgaaaagagtgaacttaataccaagattgactctttacaagaagaactaacttcaacatacgacagtctatcaactttacaagaagaactaacttccgcctatgatgattttacaacattacaagatgaaacttccaaggaaattgaaaacctcagttctaaagttaacgaggtgaatgtaagaaataatgcactcgaggaagagaaaaaggtcttacttaaaagcaccgaaactttaaagcagcacattgattcattagagaagaaacatactttggtagtttcacaatacgaatcagatattactcaaatcaaaactgatttttccactcaaatagatcttttgaaagaaaatttagaaaataagtcatcagaggttttaagtttacaagataagctagataaaatcggtattaaatttaattccttgaatgaatctgtagttgaaaaagatacactattaagttctgcaaacaaagagaaagagagtattcaaaaattagttgaccaacttcaaaaagagaaattcgaccttgaaacctcaattgctgataacaccacatcgaattccaaaactgtcgaagatttaaaggacaaattgaagaatgtagaagaaaaacttaaaggagctttggaagaaaataaaattatagaagctaaactttcacagttagaagcagaaaaaacagccgaaatctttaatttgaaaacctctgccggtgaattagagaaagaagttgaagatttgaagtccataaaaaatgctttagagattgaagtcaccaatacgaaaaaggaaatggagcttaacttacaaaaatctgaggctgaaatttcaaagcttacctctattattgatgatttgaacgagaaaaagaatttattagatgaatctttgaaaaatgaaatagaagggaaaaatgcaaccattgctgatttggataagaaacttgaaatttctacagcatcactcaatgattataaggaagagcttgaaacattaaagagtaaacatcaagagttatatacacagaattctgctgtgatttcagatcttaaaaaagagttggcatccattgaaacatcacttaaaaaagctgaagataattatcagaaaacaaaaggtcaactagaagagttgaaaactatcaaagagaatgaattgaagaagctaaataatgatattacaagtattcaaaaaattcttgatgagaaatcaaaaaattatttgtctttagaaggtgaatatcaatctttcaaagaagaaaaaaccgcagagattgaaaaactaaatttcaatatatctagtattacaaaatctttaaaggagaatgaagaaaaacttgcaaaaactgaaaaattattaggtgaagcaaaactagaaaaggaaacaactgtgacaaaattagaaaaggaattagaagaatgtaaagtttctattaattcatacaaaacaaaaatatctgatcttgaactacaaattgatacattaaccgcagaaaagaattccgaaatcaatgagcttaatgaaaagctagcctccgcagttgcagtgaaagatgaattggaaaagcaaaagttgtcattggctgaagaattaaaggttctttcacaaacgaaggataaggaaattagtgaactaagaattcaaaatgacgcaatatcttctcagttaaatacaataagtaaagaaactcaaacaaaagtcaaggaactggaaaaaacgattgatgaaaagtcagctttacttacttcactgagtaatgaaaagaaattgtcagatgagactgaaaccaatttgaataaaactgttgcggatctgaaccaaaaactcaaggatttaaataaagaaatcaaagatttgaaagaggagtcagagaaagttaataccgcatttacatctacctcatccgaattgaagcaactcaagaaagataataaaaaaacgattgagaaacttgaagctgacaaagctacgctctctaaaataattgaagagaaagattctactattgaagaactgaaatcggatttagaatcctataacacttctaaaactgctgctgttgatgtgttagagaagaaaattgaaactttaaatgagttatcagaaaaacttaaatcatcttatgctgaacttgagtctaaatatgaagcattaaaaacttcttcctctgaggaaatcgagaaactcaatgataaaattagtgatgctgatactcaaattaaacatttagatgaacaaaaattgaaattagaaacaacaattgatcaaattactaaggaaggagctaaatctgaaaatgaatatgttgagaaacttaagaaactggaagatgatcttagttcagaaaaacaaaatgttgtgaagttgcagattgagtaccaggagcttcaaactaaatctgaaaatgaatttaaagtttcaagaaagaagaatgatgaattgatagagaagttgaaaactgaaagtaaatcattaacggaatccacaaattccttaacaattgaaaatgaaggtttgatagctgaaaaaattgaaaacgaaaaagcacttaaaacttcagaaaaggaaattgaaaacctaaattcatctattgaaaagcttacatcagataatttagttctcaagcaacataaagatgaagaagtcaaatctttacaagaaaaactttcattaattgaagcatcattagaaaattcaaaattggaagagaagaacttgctgaaagccaacgaaaaaattgcttcacagagtaaggttaaaatagattcattaacttcagaaatcaaaaccttaaactttaagctcgaatcgatttcaaatgataaagagaaacttgatatgaaactgaaaaaacttgaacatcataaggaatcagctgttgcagaactaaatgaacaactttcaaacgctgatgaaaagctcgcaaaagtcacatttgataatgaaaagttagtcaaggaaaaagatactaagattttaaactatgaaagtgaactatctgctttgaaagtaaagcttgcagctcaagagaaatccactactttgagtgaatctaacaacaagacaaccatttctgaatttgaaaagtttaaaattaaacacgcaaaagaaattttggagtttgaggaacaattaagtaataacaagaaagtaaacactgatttggaaaaagagattcaaaatttggaagataagttagataacgctataagtgcaaatagttccactaaaactaacttatctagtacaatatcagaaagagaaaacactattgctgaattaaaaaagaagatagatgctctttctaacgaaaagaaagaattaaatgataaccttgaactagtgaattctcaacttaagaaagaaaaagatattgttgaatatacaaaacatgaaaataaagttgagttagaaggtaagcaggaagagatcaccaagttactggaaaataataaggaattacaagcggaattcaacgagatcaagaattcaaaagatgcagctgttgttaatttaagaaatgagaaagaaaaacttgtagaggaattgaagtctataaataacgcattcactgactctaaaaagaactcttcagaaacatgcgaacaactggaaaaggataaagctacactcaaagaaacaaatgaatctaaatgtgttgaatttgagtctaaaatatcttcactcaaagatgaattaaataagctgtctaaatctaaagatgctgaaattgatggatttaaaaaagagaatgacttgatcaacaaagagaatcaagatctacttaacttgaagaaagaaaatcaagaacttcaagaaaacttcaaaaagatggaagaagaaatgaagaataaattagatgaagctttgattctatgggcagaggttaccgagaagaaggataagtacaaacaaatactcattgtgaataattgcgagtttgaagatagtgatgaagaggaaagtgacgaagatgatgacgatgaagatgaagatagtgaagaagagtaaatttcttataattataatttttatagattttagaatataagtaaacacatgtgtaagaaaacatactattcattactgttttctttagatatctaaagaattttaatatgtgatatacagtagtatattatctaatgaataactatatataaaagaaggaaatacaaatataaaaaaaacttaatgtacatgtggtgtttaataaatgtgaataaataaacaaaaactattttctgacaatggttttcattctacctaaaaatgttttctttctactcaaaccgccagaattggtcgaggattgatgagcaccatatgcaggagcaccatccacaaatgtactgtcacctaaaccaagggtagtatcaccatgcagtttatgagatgcatttggatctgtttggatgacttctttatcaacaccaggaagcaagctctgtaaatcagcagaatcggctcttttcaccacaacaccattagagtaaccaggacgtggtggcttaacagatccttttttagctggtacagggtaatctgcatcatattcattagtattatctataccaaaaaccatatcatactgttcattttttctattcgttggtgccatacctttgattgaattatttggtccatcaattgggaatgcgtcaactggagcaacccttgtccccttattacgttgaggggtacatgcatcaaatggaccatcgtggtgaaatttaccaccaccaaaaaatccagtaacatctaatttatcaatggtatctaaatttttagaacgttcttgaacaaacttcttctttctattacctgatttatgagatctttctctatgtctgtctttatctttttttctttcttccccatcttctgaataacgatgattactttgtccgctacggttttgacgtgaaccatccctgttagaatgtgatctttcacgtgtgttataaggatcaccagtacttttagatctaactctcccatctgacatgattctagtcgatgtggtatttgtcattgattctggatttaatcttgctgaattgctagatttgtattgactagaaggaactgcaggtgccggacgacgagtactaattgtttttgcacgaactggtgcttctgatctttctgaacttgggaatggatttttttcatctcttggatattcatctttagcgtattttttagttgtcacaacttcatcatatgcaggaggcggtacaaaatcaggtgatggaatagcatctgagaatgaagatcttgatggagtatgaactggagttccagagttactacggtgaggttttgcattggttgcaaatggattgtatgaatctcttctattacttccacttcttgatctgttagcttctggtctttgttgagtaggcggttttaccattctatcatattcgtcaccttctgtaaaagaatttgcatcattatcatcatcgtcatagtaatcatcatcatctgaataaactcttgacctttcattttcttcttcttcaatacgttgttgatttagccaattgttatattgtgcatcatcaatagttggagaagatgatgatctttgtttttgtctttcctcttgtaataatgcagtacggaaaggattgtttgtggaaattctccttcctgatcccgtagaagttgtagactggttattatgattatacatttttactttttaatttgatttgtttaaaaaagggggctaattttgtttcttatttcaaataactgatctaaaattgatttgtttttaaaaaaattagacaaaaattaattgataataaatttgtcagacttcgaatgagttgtttcaaattcaaagcagagtctaaattgttctagtgtttatacctgtttgccttttataactatcaagagtcttggataacttcagaaattaagaatgcagaaatccgacgaatatctaaagattcagcaaggcaaaacaattaaaactgtgagtagtgtggagtctcggctcctgttttcagaaaaagcgaattcctgtaaaaaattcgagagggtgctttttttgtttgaaagtttctgtttttagaacacgacatgatttttctcttttctttctgctgtgccgcttacccgtttaggaaacttaactttcataaatttaatatatcttatagataatatatacaggtagttatttaaggacatcaacttatgcattcaattatttatttaatcagagctctttttttgtttacggctattttctgcggcttttgttatgacttccaaagtctcagcctttaactcttcctgcgccgcatttattatttcaacattattaagatctccagaacgtccatctttaaccatctgtttgacaacttcaatatgtttcgtaaaattcgcagcatctgtagcatccataaatttaccccaatctttaagtgcttgctctgaatcaaaacatatcaattcaagattattgacatgtttcaaataactcattctctgttgatcttccttagacacaattttacttttattaacaagttcctcaacttcttccttactcataccagtttttccaaatactgtgattgatgaattctttcctgtatctttatcctttgcactaactttgataattccatctgcatcaatatcaaataaaacttcaatttgtggtactcctttaggtaaaggtggaatatcagttaatttaaacttaccaatcaatttattatccttgactaatggtctttcaccttggtaaacgttaatatcaattgcatgctgaccatcaattgcagttgagtacatttgtttaattttacatggaactgtagagtttcttggaattaatggtgagtataaacctccatatgtttcaatacctaaagttaatggtgtaacatccaaaagtaaaacatctttaactgatccagataagacagcaccttgaatagcagcacctaatgcaactgcttcatcaggattaatttcagtatttggctttttgttaaaatactttccaacaatctttctaatttttggcattctagtcataccaccaactaaaataacatcatcaatatcttccacttctagttctgcatctgaaagagcctttttcaaaggtaatatagttttttcaattaatggcatgctcatagcatctaattcatcttcagtcaattcatagcttatactttcagtttttgttataaaaggtatctcaattttagttgtactgacatgacttaattcaatcttggccttctctgcagcctctttaattctttgaatggcattaatatcatcatttaaatcaatttgtgtttctttatggaatttttccaatatccatttaactaataagttatcaaaatcttcaccacctaaatgagtatcaccatttgtacttctgacttcaaaaacaccatcttcaatatctaatattgaaatatcaaaggtaccaccacctaaatcatataccgcaacaataccatcattctttttacctaatccataagctaaagatgcagcagttggttcattgacaactcttataacatttataccgacaatttcgccggctgttttagttgcttgtctttgagaatcattaaaatatgcaggaactgtaacaacagcattctttatttcaccttctttcaaatttaactgccttttccgatatatgtttcatttcctttaaaatcaaacctgcaatttgttcaggtgaatatttcaaactttctcctatagtagtactcagccatgcatcaccattatcacttggtacaatggagtatggcatcaatttaacatccttttgaacctcagcgtcatcatactttcttccgattaatcttttaggttgcatagaaagtattttttggattaacgatccattgtcttttagcaggttcaccaactagtacatccccatttctagaaaatgcaattatggatggtgtagttcttgcaccttctgaattttctaaaatctttacatcttttgttaattgatcaactattgcaactgcagaattagtagtacctaaatcgataccaataaccttggctgggccagaagttgaattatgacgtgctatgagattttttgaaaataatttgttttgtcccaaaacaatggctttaatttttgttctagaaagcatgcttcaaaatagtaaatatatttgttgggttttattcaagaagaactacagcttgtaatcaaaagactgtataatcggcctgattcatcagagttactgaaatttgtgattgattacgtaaataatttttactataagtcacttgattcactgatgcctttagtatgtgcctttaaaggaatcatcgttacaattactaacattgtgataccctgcttgaatcaattttcaaagtttaaatttatatattataaactgaaatatttctcaaaaacatgggttacatttgaaattatataatgatacaagaagatattttttaagaaaatacattagaaatcaacaacagggcccataccaactgatctccatccatgcatatccatattccatcctttccattgagccagtctttgttttacatcaacaatatccatataatcttgagatgaattgctgatattaaaatttgtcaggttagcaaaacttgatggtgaatgatgtaagtattctgtaccacttaaaacagacataccatcatcatcatcacttgatttgatatgatgagaagcatcaattctagttttggtcaattgtgcagtcaaacgtttaacttgttccttttgtgtttcaagttcattctttatagtttctaattccatttctaaatccattttaaccagtttaagctctaagttatctgactttaaagtacttacttcagattgtaacttattattttcgtcttgcaggtcttgaatagttgatttcaaagtattactcaaaaagtcagattctccttctgtgttactattgaggatcttatcaaatgaatcttcatcattgttaatttcttgtgctgtactttcaatggcagtctcttgtggttgcactacattggatgcttcaactggttggctctcttgttgaatatcatcatcttcttgtttttctagggtatcttcaaccttatctgtttcttcattttctttatctatagattcttctttaatttcatctttttccccattactttcttcaatggttccttcatctttcttttcatcaacttctggggcagattcaccaattgttggggtatcttcacgttgttcatctgacagcacatcgccttcatctgatgcttgtttgaatgcatcacttgactcagttttatcctctatcttttcagcctctttatctgttatttcagtcgtttcttcatcagcatcaccagttgtatttgaatctgattttgtattcttcttacccttcttcttattctttttcttacttttgtttcatttcttcaaacttctttcttgcagcttcaagcttttcttctttcggtcatattttcctcgctcattttgaatatcttactttatgataatcgatggataaaatctttgataatctaaaagagagtccccttacacgtcaacatggatgtaacagtaagacttaaagaactgaaacttgttcatcccaacatcgactcagcgacgctaataataaaatttagaaaatgatttgtcatattgcgtattgcctaaatgaggaaaaggtaaacattgaaatatttcaattaagttactacaataggaaattttagatgattaaactgattttacttataatttattgttagtttaattacaaacctagaagtttaatgagagttattacagattaaaacatttctcgtctatagatttcctatattctttactaattagttatctttcttctattgttcattagaattttttatttatattaaattgatcaagtcaaaattaaaagataataacaattcaaagataagaaccaagaaaacaaaatgacatcagcttgcttacaatctgaaaatatgtatgccaaaaatttttggtccgttgatacgacttctcaaagtacattgttaaatcaaaacgaaaaatcaacaaaaacattacatttactttcaacattttataaagagttcacaaacttggaaagtgaatattcaaggaaactgaattctttggtatcaagattagaattaccaaaatatgaaggttccggtacgttgaaaacgagtctagatgttttccaagaacaatgtattaacattgcagaatcgcatactttacaatccagaagagttcaagataatttacaagtaccacttttagacttaataagtgagagaaaagcaagacaaaaagcacttgaaaccaaaattcatcaagcatggatcgaagcttgggcaaatcaaaacacaatgtgaaacaagagcaacaaaatttgaaaatatctggaatgaaatgagtacattgaaaagcacaagattaactttagatcatgtggaaagtcaaaagctagaagacaaattatcaaatatgaaaataaagatgctaaaaattagagaagaaaactgggagttagtaaataagtataatgagaaacttgattcttggatattattttggtggaatacttgtaatgatttacaaattgcatgaagagaaaagaattagatttttgaaatctaatctttgggaattttcaaatatttgtagtacgttttgtgttgaagaggatcaatatgcagagaatatgagagtttcacttcaagattgtagtgctaaaaaggatatcaattattttgtttcacattatcagaccggcgataacattttagcacctataaaatttgtggattttgctaaaaatgagcaaagaccattacatgatgaaacaactagaaaatttgatatttcagagttcccggaattaaagaaagaaatcaaagaattaccaaagaagaaaaatccaccaccaaagttgactgaagctggagaaactgcattttcatacataagtaaatccaaggaaacatataaacaattacaagaagaagcacaaaatgaagcatcacaattaaaattaacaagacctaaaagtgtatcgtctaataaatcactttcagaaccaagtacgtacaaagtgatgtctgattattctaatccaacagctcaaacaagtatatcatctcaaagtatcgatgaaagatacgaaggaaatgattatttacatactaaagagaataggcgcagtaaaagtaattttggaaattatgatgatgaagaagaatcaaataacagaacattaacaaaatctagagatgaagaatcacttataggatttaaaaatcaagatattttccgtgattcaatgtctccatcaaaggataaaaccaaaacagagaaacataattcatttgcaacattagttaaaaataaatataattcatcaccaaaacgtaattcgaatgaagtttttgaatacaaacagatattaccaacaactaatagatctaataataatataataacactaaatgaaaatcaagttaatatttcaaataaatcaccaatacgagattctaattccataagtaagtcaccaacaagtattaaaactaaaaatatttcaccacgtgaactcccaactaaatcatcggaaggataccccgttattatgcatgcaaaggcgctatatagttataatgctgcaattgaggaagaactttcatttaaaaaacgtgatatactgttggttcttcacaaacaacctgataattggtggtttgccgaaaatatcaactccggtgattcaggtttaggttcctagtaattacttagctcaacttaaataatcaaaacgattttaattccctattatgtaatataaatttgtataactataactaattgtaattttttttgttcatattacacaatttacatattaatgatacttttaacataataataacacgttgcagaaaatacaaacataccagttacaatcgaccagaaccaagttaaatcatctttatcttgaccaggaactaaacaattcataccccataaaccagttataatatttaatggtaaaacaattgtacctaaaactgtaatttttcctagtatatcattcatatcattattaacttttgtcatatcaatattaatttgagctaaataatttgaatgtgatctagctagtaatttttcataatgatttaaattttgaaccattgtaactatatgatcttgaatatcacctaagtataatccaatttctgtacgtggtgcaacttcccattgttcattatatcttttagagaaacctttgataacatctgcctttgaacctaaaagtcttaacattgacataactctacgtctacaatcaccaattcttcttaacatatcacctttccttttccaacttaatgattttagtatcagctgaacttaaactactatacgatgtacttctcgtacaaattgaatctttatcacccgttatattagaatttcttctctttactttaatccaaacatggatcatcatgataatcaccttcatcatctgaatctgaatcatcggaagaatcggatgtatctcctgattgcattgttataatttcatcttcaatatcattaacttctgtttcaattgcttcaattaatggagcatatgcatcagtaatatcatcaattaatgcatagcctatccaatctgaatgaaattgttaaataatctcttaataatctagcacgacgacgaacattaccagtatgaggagttggttgaaaatgaaatgttataacaccatctctgaaaacaactatatacatggttaatggtattaaatcatccttattatgtttttttcttttatttttctttgaaaatgcagaggaatttgatttttttaaatcattacctgattttctagatcttttagaagctagtttgaatgtattgatattgcaccatttgatgaagaatttgatcttctccttctcaaagtatccaaaattttagcaagaaatggacgatcatttttagcctttgtctcttcctcttcaagtaaatctgcatatgccttctctgcggctcttttcagtttttcatgttcttcactaacatcaaaagatgtaaaacaaacaaaataataatctctaaataattcaactttttctcttgcttcagctaaaaatatatcttctgatgttaatggatgaataccaaaagttttagaaattgccttcatttcatcctcggttggatttaaaacatcaagccaaaaaggttctaataaaggtttagaatttgtagtggttgtaactaatgaaggttctgttgcatttgtcatacttgggaataaagttgatgaatgttctacactttcgtcctttgactgagattgagtaggtacttgttgatttattggttgttggggttggggttgaggttgaggttgattttggttttggttttgattttgatttttaattataggttgaggaggttgttgatgttgattttcagttgagctataataacttggagaaaataaatcttcaaattttcgtccaccatgtaataaacctgaaattgatggtgaatgaatggtatttgaaatatcttctctaaaatatgtaaatctgaatttagttaatttatcttgatgagaaacgtaagctggtttatcccaaggagaaagtttctttggtcttaaacgaccattaattggatcaatttcttcattagttgaaacaatcaatggttcattaatgtcatcattatcaatatttgaaataattggatattggaaattaacactattactatcaaaagatttatgacttgtagatgaagatctatctttccttaattcttgtaattcttcatttgaaaattcttctaaaacttgtaaatttggccattttttaattttattaacctcatctaatgattcaactgggaaacaaacatcatttaatgatgaaacttcagaattacctcttgttgaaggatttgatgatgcataaagtgaattttcatcatgaatagaggtacttaaataattttctgaaaatgttgatattggaactgattttgaatgtaataatggtgtttgaggtagtttgttattaggtagatacgcaggtattggaatatctctacttttttaaaatttggtgcagatgttggattattactaaatggattactaaacccattttctaaactagatgaaatattagaatttttagaattaagtattgagctatattcatgatcattatgataagtatttgttgaaccatacctatcctttctatgagataataaatttgattgttgagtgaaagcatcattattctgttttattttagaagattgtttaattggtctaatcattttttcatctggatgaatatctgaataacctctatgatcagcaaaactaccatgaggattataattcgaatcaatattactactattttcactcattatcatacccattgcatcaattgcattttctgtattactactatgatttgaatttttacttgtatcatttgaacttaatgaagttattgaattacgataattgaaatgtttgatatgatctttcttaccatcggcattaccattatgttgtgacatactctatatgcaatagtatcttgtagtatcttgtttaaaagaaaaaaaaagaaaatgaagagccattacagatgaaatcaaattaaacaaaaaaccgctcctcttaactgttatcgcttacacttagattctatacaaaatacacaatacttattcagttttaacacgtttggtatcagtagattcactaacatcttcaaattcaatatcatcaatatcttcttcgtcatcttcatcatctttctttttatcactattagttacagattttgcagcttccgcaattgcactctgtttctccttttcttcattctcctttgcaacttttgaatctaatgcagctttcataagtgaaaattcttccctatcatcaattttatacaatgcttcacttatatctgttgttttaccaacaagtgcattccattgttcctcagtaagtgaaactcctttactacctggtaaccatttaccatctttttgataatattctcgtatatcaacaagtttcatatttttgaatttcctaacagttactttctttttctccattccaagctatattatattctatgttagtatatgtgttattattcaatgaatacctttaaatatacatacatcaaattgtatttgaggttgatcagtagagggtactccactactatttgcatcatcataatttctctttttgaaaaatctcttagggggcattattaacagtgctatttatactatactacagtactcaatgtctaatagagaatacaaacaacaacatattgttattaaactaacccaacaccaacatcaagtatagcattgtatattattcattatatactacataatactaatactccccataataaaaattgttttctaagtaaagcgcgaatactatattattgaacttattgcatgattacctaatctggaacatgtatttcaagtactttggatcattgatataatggagtggttaatgatttggaaaatataggtttatgtttgagagatatactcaattgacaagaaatataatgagtcttgcacttccgaaagtagacggtaaattatcaggtatttctccacttatactcggtggggcagttttcaatactcaatataatgataaccctgatttaatgccaatccccgatttattgactaaaagtttccaaaatggtataaatgcaattgatacatcaccatattatggaccttctgaaatcctgttaggtgatgcattaaagaaattgattgatgatggtttaattgttagagataattattatatttgtactaaagttggtagattacaattagatgattttgattattcacctgaatggattgaaaaatcagttcttagatcacttgatagatttcatacaaattatcttgatgttgtatttcttacatgatattgaatttaaatcaatgaatgaatcaattgctgcattagaaatgttaatgaaattaaaatcaaaaggtttaatcaattatgttggtatttcaggttatccagttgattatatttataaattggctaaatttgttaaagattatcctaaaattggtgaacttgacttaattatgagttattcaaatatgtgtttacaaaatataactttagaaaattattatgaaaaatttttaaatgatacaaatgttaaattagttaataatgcatcaattttatcaatgtcattattaacatctcaagaaacaagatctttccatcctgcatcaaaggaattaagggataaatgtgaatcaattagcaattttattaagggataattatcaaactgatatagctgatttatcaactcgtttcgcattaagaaaatggttaaataaaaatggtagaacagttattggtgtttcaaagtttagatgaattaaatgctgcattgaatcaatataataatgtaattgaaggtaaaatggatgaaaatgatggaaaattaataaagattagtcaagatttcctcggtgatccattttaatgaaacttggtcaagtggtattgaacattaatcaatgtatattatttacttttatcataacacattttaattcataaacaagatacacgagtaatatatagaatactatataaaaataaataattacctaattgaacttacaatttagaagataaatcaccattaagtaaatgaatagctgcaaaatcaattactttaacatttctttcaacaacccaagtttggaaattaacaattgacccattcttccaagcaataatttttaaagtttcaccaggataaacaaaacttgtaaatctaactttgatttcatcaaacataccataatgttcaattaatgcctttgctgaaataccgaaagagcaaagtccatgtaaaattggtttggcaaaattaccacctttggcaaacattggatcaatatgtaatggattaaaatcaccatttaatctatataaagcagctaaatcattatcagttttaaattcaaattggaaatctggattatttaattgatttgatgaaacttcaaaatcttttaaataaaaattacttaaacctgatttattttcattaaaattttcatctttaccactaatcgtttgactctctctaataaaatatgatccaatatttgtaaataataaatcgccatttgatgtaaaagttttataaccatatcttaaaagaacattttttttacctttattatttttattaattatttgaattgggaatgatgttgtctttaaattatcacttgttggaattgggaatttattaatttttaaataatgttcaccatgtaataatttcattggattatagttatcaagtaaatcattaaattgtaaagctccatcacttccttgattgaaaaatggtataacaccaaatgttggtaatacttggaaatttttatcaccttcaaaaacatattttaattctttgctatttgcaccaattgataaattgtaaagaattacttgttgatgatcatatgagaaagtatcttcatcatttgatgattttgctttcttactttttgaaccaattgattgagtaacagtttgtaaaattgccattgatgattgttcagcagttttcaaagtaataggtttagagaaatcacaaacttcatcccaattatcttgaatgaattcaggtttaatataatcatcatgagaaactgcaccttttgctctttgccatcttgtgttaccaatccaacctgcaccaacttcaaataattcacccgttaaaccatttaattcatttgaacataataataaaaccattggactaacttgtgatggagaaaatttattcatttcatcttgtttgaaaatagttttagtcattgcagtttctgcatgtggtgcaattgcattacatttaataccaacttttttaccttcaattgctaaagatctcgtaaatgctaaaatacctgcttttgctgatgcataattagcttgaccaaaattaccataaatacctgaagttgaagttgtattaacaatataacctgatttttttgaagtgaaaattggccaaactaatttacaaagtctaaaagtagccaatacatgaattttaataacttgatcccattcattctgtgtcattttaataaatgaacgatctcttaaaatacctgcattattaattaatatatcaacagtaccgaaattatccattgcagttttaacaatatcatcagcttgtgaataaacatcatgttttgaagcaactgccttaccaccgttttcattaattaaatcaacgacagtgaaaggatcattaaaatcattaactacaactttagcaccatatttagcaaataataaagcatgagatttacccaagccattacctgctccagttataattacaactttatccttaattgattttaaatttggtaattttgccttaactttaggtaatttacttgtaatttcccaaactttattataatcttttaacataattggataatctgtacctttaccattaaaattgaaaatttgattaaaattttctaaaattaattcaggggttaaattatcatcacttggattaaggtataaaccattacttctttgccatttaatttgagcaaataaacctgcagcaacttcataaattgaaccatttgaaggacattcatttgatgataagaataaaacaagtggagcaattttttcaggtgataatttatccaatatatgagaaggtaaaactttttcagtcattcttgatttagctaataaagaaataatattagttttaatattatatttataaccttccttagctaaagtttcaccaaaaccaactaaagctaatttagcacaagaataattagtttgaccaaaattaccatataaaccagcaggtgaagcagtcattataattctaccaaattttttctctttaaatattgaccaacataatttagttaatttaaaggcaccattaagatgaacatttaaaacatcaataaattgattttcattcatatttttaaaacttgaatcttttaaaatacctgcattattaattaatatatcaacggtaccataattatccaaggcagttttcaaaataccttcaggatttgtaactaaattatcataattagcaacggctttaccaccatttttaataatttcatttacaactaaatcagctgctttatttgaattacctgaaccatttaaactaccacctaaatcatttacaataactttagcaccacgtttagcaaattctaatgcataaactttacctaaaccaccacctgcaccggtgataataacaactttatcatttaatgagatcatattttatttgataaaagagatgaaatgagataaaagaaataaattatgataaaagagggtaaatgttgtttcttttataagtataaattcattgaagggcataaaccgccattaatataaatatagacaaataattgataatatctcaaaagtacatggatgatgttaaaagcacggagtaatataatgtattgagtaccccacaatagattttactccgaggtatagtaacagataatttgaagttactccgaaataatttgtatttgacacagtgtggagtagttttttatttaatttaaggctggggttgtggctggtgagtaaactttaatgtggctagtgtggttatctatcttattaagtaatagtcacgtgatgattatgtaaacagattatgtaagacgtggaagctcctcgggaataaacaaatcagcatatcaaattaatcaaattgacacccgctaccggaattaaacgacaggaactaattttagactccgagtgaaatttaattaaaatcagttgttaatgaaattattattaattattaatattaactactacttctttctttaatcaacttaacaattatgacagtatttacaacaataatatcaccaaatgattgtaatgataatagatttttaaatcctaataaaatttctccaaatattgattatcaattacctccatttacatttttatcaatttatcatattcaaaaatatttaaatgatattttatcaataccttgtaaaattcattcaaattcaactttatcactaataatttcaaataattcacttaaaggttataaaaattctaaaactttaaataataatttcgatattttattagaaaattcaaaattatttagattagatttagattttactcaatttaaatttaattcaggtattttaactagaattttctcattaattaatcatttacagaaaaaattccaatataatttattcttaagtttaactttaccaattaacaaaaattaccttttggatgatgaatttttatcactgattgttagatttaataatgaatttattaatattaatatgattaatttattaataactaaagatagtaaattgaaaaatttaacttggtttgaaatttttcagaaaacttatttaaatataagtttacaattgaaaaatttagatcataaagatgaaattttcattggtaatattgaaaaatatttaggtttcgtatttgatggtgatataataccttcgattgaaaatgaaaataatccattatctttaacaaatagtgttaaaaatagtgtaagacaacatgtaattcatggtgaaaggaaaaatatgaatgaattagaatttttgaaaatttggaattatttaaattattggaaaattaaacaatttaaaattaaatgttatttgaataattgttcaaatattaataaattaataaataaattatcaccacaactgaataataatgaaaaattattattaccaaaagatttcttaattgaattagcaaatgaaatgaaaacttatgataataataatgattcagattctttatcttctattgaacaattaaatataattgaacctaaaactcctccaccttatgataaagcaattgaagataaaataagagaaaatgaatatttcctgaataaattgattaaattaccaagttattatagtactcattaataatttcattataatacattttttcattatcagtaaattccttatataccccacaattttctccaacacattcatttgcacaccaaatatattcattacataatgatgttttaaacataccaatttcattaactttattaccaatattataattataatttggtggtataatatatgattcaatttctatatttgatttataatattcttctaattcttttgaattaatattccaaaatttaatctcttcctcataattaatattttttagttttggacaaattttaatacctgaattaatccaaattaattcaccagtttctgatgaaatatgtgcaggatgggcagaacatatcatatttttaccatcttcatttttatcaactgtaccaacacttgcagtccaattattatcaaaataaaattcattactatcataacctgataaaatcattgataaccaaaacatttccttatctccataacttgcaattaatgttgacctgaaaaatggtaaaaataaaattaatttaattgaattccaaaatttaattctatcaactgctaaaaatcctgattccatataatggaaatatttatcctttacatattcagatttccaaaaattttctaatttactaggtgagacattttcaataaatttcaaaaaatcttcactcatatgataattcaagtttcgatctttataaaataatgtcccatgcttattgaaattttcggaattaattaaaacattctcaggtgattgaaataaaactgtatcagtatctaaaataattgaaatttggaaagtattgaaagcataagctaaaagtttattaaaataaccacgaaattcatttgaatattcaattgataaatatttggaaacattaatgaattttaaattcatcctactaccgtatattttattaattttttcaatattatcaactaataattcatcttctctatatattatctgtatcggtaattttgatttaacaatttgaagattatttaataataaaatacattcatcaacattatcatcaaaaacagttataacaattcctgtacctttaattgaagacttaaaagtttcccattggaaattttgtgataaaaatgggtaaaaaatatcatcgtaattattgtttgaacatgaattgtatttaattatatttttcaaataattaatcattgtaggatttgaatgagtgaattgagaatctataaaaggttgaaatttttctgaattattaaaagtacatgatggtgataatgatgatggtttgagggtgtatattatcaatgtaaatagtattatgatgaaagttatatgtgaacgtctcatgttgatatgtgaagaaattggttatatgatatttaaatcgatataatgttgttgctatgtttttgtttttatttcttcaagatatttaacattaagaaatcgtgtatgtgttatttctattgacctatgataactactttgatatataccttctacttatataagttcaattctcttcctaaggctcataccataagttgatctaagaagaaaaagttatagtaaagattcagagagcgaaataaattttgaatcaaaaaattgacgtagtgttatttaataataaacgattgattaattcttgctaccattatgatataaatatagattacaataatttacagaattacacaagatctactagatttccttgatgaataagaattatcattataaggactattattattctttgattttgattttgttattggttttgtaattgaagataaggagacattacgtttatgagattttttatcattattataataagttgaatttctcttattttgattaaaattattagattgttcaaattgtttttgttgttgattaattttaacaatattttcgaaaactttatcaaataattcattaacattttccattgtaatacttgcacaagttatatgagcaactgcgccaatatttttagcaattgcattagctctcattgaatcaactctatgaattttatcacttttcaaaccagtaagtataattagagcatttggtgcataagtcattgattcaggagcccaaacttcattaatattttctaatgattcaggtgcatctaatgaataagcaattataattatatttgcatcactataagataatcttcgcaatcgttcatattcttcttgacctgcagtatcccataaatcagctgcaagtgtaatttgaccatttgttacaattgctctttgattttcgaaaattgttggttcataagttgttggaaatttaccttgaacataggaagctaaaagtgaagttttaccacaacctgaatctcccaccactactattttacaaggagtagcatcaaaattggcattggtagtctctactagatgaaactgcatccctatactaaaagaaagcagtcaaagtaaataccctattaatagtaataagagagttacccgctatatattaagtaagtaagtaatattcgcgcttagtattatacacacacactgtttttaatattatagtataaagggaggtcgctgctgtattttatagaggggggcgatatctgctttgtttattatagtgtttattatagtgtttatttaatatttattaatttaacacacacaattatgcctgcaaagagagaaccaaagatgaaagatggaaaagaagttaaggagagaaagaagaaggatcctaatgcaccaaagagagcattatctgcttatatgttctttgcaaatgctgaaagagataaagttagagctgataatccaggtattcaatttggtcaaattggtaaattattaggtgaaaaatggaaatcaatggatgctgaaatgagagaacctcatgaagcaaaggctgaagctgataaaaaacgttatgaaatggaaaaaattgcttatttaaagaagaaagaaactgaatatcaacaacaacaaaagggtgattatgatgatgaagagtaaatttttagattgtttttttatttagtgtttagtttagttttttgtatactataggcaattgatcatatcttattaataatattattgatcaattgatttatttactgtaggattatatattttataataataataataataattatattttattttggaaattgtttattagcagtaattgaaaaaaacaaaacaaaacaaaacccattttgacgagcctcaatctacatgtacacttcatttattcaattgtattgtatatgatcactatatacacatttcaatcagtatatatatactacatttctactcctatatacatcttatactactattatactcctatttgcagtccctactttcatccccaatacacaacatcctcattaattaatacagtggctggacccctcccacttaaacactaagaaaacgcgtaaatttttatctttaccacattttctatgttgtgtttggataatctctctgtgcaagtgatagttttatgtctgaaaggtgtggttattggtagaatagtgtgttaaatgtaggtgttatcaaatttattatacttgatttagtatctgtgatacgttttatttaatattacacgttaattttatacttaaatcaataaaagaactctcttgatgagcctccaaaaaagtaaaaattaccattttaagaaaattcagctaacgatactaaaatattatcttctaaatctgttaattaagaataatattaacataaaacacgtaaaacactcttttaacgatacttataactgaaaatgttcattacaatacttaataaactttataaattttaaaaaaactatttaatctaatcctttttttgtaaaacaacaacactttcaacatgatgagtttgtgggaaaaaatcaaatcctgtaattgtttcaatttcatatttattaccattaattgttttattaatgaaaaatttaacatcacgagcttgtgaatgaacattacaactaacataaacaatcttacttggttcaaattcacttaattgatttaaaaataattcatcacaacctttacgtggcggatcaagtataacaccagtttcatttcctggaaaatccattttttcaaataatttctctgctttaccccaaacaaatgaacatttatcctctgttaatccatttaattctgcattcttcttagcaaacccaacagctctttcactaatttcaactccaataactttttcaactgatccagtacttgcaattgcaacagtaaataatcctgatccacaatatgcatcaactaaccatttaatattacctaatttttcactaacaaatgaaataacttttggtaaaattgatctattattttggaaaaattcatttgcaacaaattcaaatttaactgtttgacctaatcccgtatcaactacttcagttataattgcttgtggatcagttacacatcctttaccaaaatcttctcttaataaaattgttgaacctttcttacttctttcaccatttttccaagatttctctaatttttctctttcaacaattaatccatctctaacactttgtgttccaataacacaatcttcaatatctaaaacatcaccaaaatatggtctaattgaacgttcacgcatacctctccattcttcactaacattttcttcctcctttaaccaagctcctttacccttccatccaaatccaagtcttggaatacctaatccttcactcccacttcttggtacatcataatgtggtgttaatttggtacgatatccatattgtaatggacttgcaacagtattttgaactttacccttccaattaacttcatctttacaaaaatgctcatatgcagcttcaacaacttctctcttaatttcaagctgtttctcatattcaactggttggtattgacatccactacaaattccaaaatatgcacatttaacatctccacctttacgtaaatctgacatttcaacaaattttaaaatttctgcatcaacataaaatttatttgtatgataaactcttatattgacaacatcaccagggaatgcaaatggaactgttgcaatttgaatttttggcatcttagattcttcaactgtcctacgatatggtctctttcttatatttcttttttgaaatttcttctcagttgtagttgaaccttcctcaccttctttcttttcttcatctttcttttcatctttcttttcgtctttcttttcgtcttcctttttctcaacatccgcttctctaatcatttctctttcattagcagcttcttgacattctaaaatagttgcaaaactcggtgcacgtataattgctaaaccatcaccctttgcactcatttctaaaattttgacatttttaacaatacgtgaattaaatgcatctaaaacacctgcatcattaattatatccctaacaggattttcaacatctttaattgtaatttcattattatctttattaaaattttcacctaataattcttcaatttctaacttatgtgtttctaataatttaggtatttcaaatgattgtaaaacaccaattggacttgtctcttcaattttttcacgaggtggttttctatgtggtgctcttttacgtgtaatattatttaattctcttaattgttgtaatttacttgcattccattcaactctttcctcaacttggatatatttagccttattaactacttgtgtcattattgaacgaactaatctttgcattaactaataaatcaagacccactttaatttacttcatacaaaactttcagtgtcaaaaaaattatttttattttttacagattgaaaaattattacaatattcaattctcccattcgctgttgaaaattttttttatcaaaaaatgtccagtattacgtaagagatgttgttatgttcaagccacctctttattatctacaactaagttacaattacatgtatgttccaattaattgcattattccttaaaaatttatgtaaaatatatcaggttaaaccttttattctatacattgttttgattgtattttacattttgaaaacaatttgaaaatttcttaattccattcaccttgtccattttgatagtaaccatttggtccgttaggaaattgtgaataattaccattattaccactaaatccattaaactgtgcataattaccatttgcatttgcatttgcattattataatctggtgtataaccataagtatttgtagcatatggactttgacctcctttacccttagaattattaccattatttgatccataatttgcattttgtccatattgactgtaaattttatttgggaaaccaaattgtccttgtgattgttgaccttgagttggagctggagtttgagcttgtgctgatgtttgagcttgtgtttgagctgatgtttgagattgttgttgttgagattgttgaccttgttgttgacctggttgttggccttgttgttgaccttgttgttgtggttgacctgcactttgaccttgagttgatgattgtgatgggattccttgaccttgtggaacttgtccttgatttggataaccaacataaccagtttgtggttgaatataataataatatggtgatggttgataatattgtggcataccatacattggtgacatattattcattgctgccattgggttactcatatttggtaaaatattactattaactggtgatgcaacattcatttcactaccaacacctggaataccattcataccatatggattttgtaccattggatccataaattgttgtgaatacataaattgattttgtgcttgaatttgtgcagcttgtgcttgtgcaatttgagttggatcatatggagtttgaggatttcttaagtaattgttaatatcaagattgttgtaattattttcatagaatttttgagtttgagcttgagtttgagcttgagtttgagctggaacttgtgcttgttgttgagtttgagctggaacttgtgcttgttgttgagtttgaactggtgcttgtgcttgttgttgattttgtgctggagcttgagtttgtgccgctggttgttcaattgaaacattctttaaatcctttgcaacttgttcaatttccttttcttcaacttcctttgattcttcagcttcagcaatttcttcagcaatttcttctacaacttcttcaataatttcttcaacaacttcttcaactgcttcagcttgatcaattgcttgttcaacggcttcttcaataatttcttcaacagcttctacaatttcttcaatttcttgttcctttaattcttcctttggttcttcctcttccttaatttcttcctttttaacaactttggcaggttttaatctagctgcccaagttagtggagcatttgaagtagttgatgattctttaacttcatcaattattggttctttgacatttgaattttcaataactggtttagtctcaacttcttttacaatttcaacatcaccgttattttcattttgttcagtttcaccattaacattattttgttcatatacatcatttgaagaatttttctttaatttacttgcccatgaattacctgaaccagaaccagatcctgcacttgtagatgtattagttgtaccacttgatatatttcttttattaatattagtattggtattgttgttaaaagtttgagatgattttggtttattaaatcttggattcttatttgaatttgaaatatgagaatttcttttattttgttgactaaatgagttattagattgatattgtgatgaattattatcatcccaatgagatgaatgacgcgatgaagttgatgaagaagagtttatatgtgttgaattatgtgttgaattattattaatactgttattatctttactgttattattaattgattgaattgattcatcatcatgatcttgtgattttttcttttcatcctttttattactaacttgatcccatttttgaatttttccactaaaaattccttctaaaatatcttgtacatctaaatcaacaatttcatctttaattgtcataaaatcttgatatgaccaatcagggaaaatatcagttaatgtatcaattttaacctttaattcattggcattatttgtattattatttgatgatgatgatgatgtgttatttgatgtattgttattgaatcttttagagttatttctaaatttcccattagaggaagatttcttcgtttgatgttctactgtatcagtcatagataattttattatattatattatattatttatatgtgtatttggtgataaaaaaattgtattgaattgataaataattttaatttaatacgatatagctgagacagaaatgtgtttatttaaattgaattgtatctagtaaaagatagtataaattaaaggagataaaaataaattataactaaatgtaaaacttgtaatctataagataaaacctctcacaatcaaaaaagtggcaatttgcgtccaattcactggaaaccactgagttttctcaaatttgaaaaattgccactcaaaaaaaagaaaatgaccaaattaaattcccctgcagcgtcgatgcgtcgccactgagaatttttatatctttgttaaagtgaagattaggtaatacaaattttaattttccatcgctacatggaaatcttataggattgacagaatttgagcaaattatcagtactagaatggttcagggagagccaaagaagtgtgtgtattcacatggaaaagggtttgaaagtaaggaatggaacgcctgaatgtataagtatatctatataaatacaccttattccgccatgttgttgaacacagatggtgaagatatttgtagagaagttctttaaaaaacatcgaaatcgatatacgatacaactactaataaactattgtttcattttctttttattatagatttgttttattcatagcgactacttaatataaaatctccaaatttgtcatgtcagataagaatacaataagtttggttaatataccattgggtaaaccaattccagatatctcacattcagtctcagtctctatacctgattggaatcaatgttggcaatacatggaacaaaatgaagatatttggaaacatatcactgcaggatatccaagattttatgttaatccaatactaaggaaattaatggatgaaatgattgaaaaacattctattaatgataatgaatcatgttacatatatcctactatggaaattgctcttgattgtaaagaatttattttatcacattatgatcaaaatgaaataaataatccagttattagaattattaatgataatgaaatttattgtgttttccatccattagagattgaagtaactgctaaacaatattgggctaaaataggtcaagctatttcatcacgtcaagctgagtgttttatgaatggtgttactaaggacaattcatcttcttccaatgttaaagatattttacgtgatagaattgctgaaatttatggtcattcaactaccaataatgatgtttatttatatccaactggaatggcatcagtttataatagttttaaaatcattcaaaaattgagagatggaataccagtttgtttcggattcccatttgttgatactttaagaattttaagagatttccgtgaagatgaatcaaatgaatatgttattttcttaggtcttggagatgaaggttcactaatcaagttagaaaatgaattaatcaatggattaaaaatatcttgtctctattgtgaattcccttcaaatcctttattaaaatcaccaaatttaagtaaaattaaagaattaggtgataaatataattttttcattgttgttgatgatacaattggtaatccatttaacattgatgttttagaatattgtgatttagtgattagttcattaactaaattattttctggtggagcagatgtaatgggtggaatgataattttaaacccaaagagtaaaaaatattttgaatttaaacatgaaattgatttatcttatcaagatgttttgtttattgaagatgctaaagtattagaacgtaattccagagattttggacaaagaaatgaaataattaacaaaaatacagaaaatattgttaaatttttacaaggatgtgaattaatttctgatatttattatccatcaattagtgaatctgttgataattatgatttctttaaaaaatctaatggtggatatggtggattattctctattgtattcaaggataaaaataatgcaattaaattttataataatattaaatatgcaaaaggtccatcattaggtacaaattttacattaatgtgtccatttgttatgcttgcacattttaatgaattagataaagttgaaaaaaaatggggtgttaaaaaagatttaattagaattagtattggtatggaagacataaatgaattattaaatgagtttaatagagttttaaaaactttataaaaagaagaagaattaaaattgtatataactttatagtcataaaaaattaaaattaaaaattaatttaatttaattgacccttagtgtggaaaacttcaagagcttcagtaattctctttgacatagtcttttcaccttctctaacccaaactcttggatcgaagtattttttatttggtttatctgcaccatctgggttaccaaccattgataagatataatcttttttattaagaacataatctctaatacctgttaagtaagcatattgagtatcagtatctaaattaactttaacaacaccattagagataccagtattaaattcttcttgagttgaacctgaaccaccatggaaaactaaataaagtggatgttttgcatcagtctttaattgttcctttgcatattcttgatgtttacctaataattctggttgaagtataacattacctggtttataaacaccatgaacattaccgaaagctgcagcaattgagaaatttggtgagattggtgctaaagctttataaacactgaaaacagtttcagatgtagtatataataaatctttatgaacatgttcattattaacaccatcttcttcaccaccggtaataccaatttccatttctaaccattggttcattttagccattctagtgaaatatttaacacaagttgcaatattttcatcatcattttcttcagataaatctaacatatgggatgaaaataatggttcattatgaattttaaagtatgcttcatcagcatctaacataccatcaaaccatggtaataatttctttgcacaatgatcagtatgtaagataactggaataccataagttggagcaattgatctaatataatgagcagcagcaatagaacctgcaattgatgccttttgaccatcatttgagacacctttacctgcaaaataagctgcaccaccatttgaagtttgtaaaataattggagaatttgaatctcttgcagcttctaatgctgcaacagcagttgatgaagaggtaacattaattgctggaattgcgaaacctttttgatgtgcataatcaaataattttctaacatcatcaccaacgataacacctgtctttcttgaaaggaaatctaaagtcattttttgtttaattagtagtttgtaaatatagttttaatactcaattgagttgattggaaatagaaataagttcaaaagaataaaattacagccttcaaactacaaacaataattttagggataaacacctgtatttataaccattattccagcatagaatcattacactattaaagtggaaaaatcatgacatcccgggatttctccccccgttcccgggttaaaaaacacccaggtcggtgggtcggccgtgtgattccccctcgttttttttcttttaaatgacttcatcacttcatcatatataatattcaattatggtgatataatttatttaaacacaccactttgttttcattttcattttacatcttaatgaaatttactttatgttattatgtctgagtatagtggtaaattcgatgcaaatattcaacaaattgtaacaaaatttaatgaaactttagaattattaaaattaaataacaaaagtattgaagttcaagctgttgaaagtattcaaattcaatcaaatactcaaacaattattagattaattactgaattattagaattaactaaaactttaaaggaaaaatgggtacttggtcaagtttatccaatgggtgatgatttattaaaagatcaagagaaaagtgttaaattatataatgaaataaataatttattagaacgtattgtacagtaaagtttaatgattaggaaagttaataatgattatagactttttcgtagtagttagatagtatattcattgattagttatgttttaacactattcaagttaatgagtttatcctcagcggataagataatttttaattttaataagaagatcgatttttttcactagctcatctcatgaagtttaatctgaatagcaaataccaatgactcaattgaagacggacaacccatcctttaacatgaaggatattagaggttaccgacttgcactgtttcttttaggttatttactcattccatttatagcattaacattatttttattaggttatgttcatttaccgaatattagattcaatgatatctggatcatcaaggaaattgaaaatttactaggttctgagtacattaataccgttattgacggtttaataaaattctttaaagatattatgcctatactgaaaatagtttacactgtattatttgctcctacttggttaaatttttttggaatgaatattccaaagaaatatgtgatacgattgagtaagtgtattagtataggaataagtttaacattattagattggagtattcatgtttaccaacagtatagagataacaattaaacagtagtagatttaatgataattttttttttcatttcataacacagcataatataggagatttataaatttatataaaataacattttaaaagaactagctttttttttcatttttaacttaatctatacctacttatttttcagtatcaacaacatatctacctaaaattttaccttgttccattaattcataaatttttggtaattcagataatccaacaactttaattggtgatttaactaaacctcttgtaaagaaatctaatgcttcagcagtatcttctctattaccaacataagaacctctaatttgaattgatttaacaacatgttcgaaaactgatgattcacaaattgcatgagcaggtaaaccaacaagtacaactttacctaaagttctaacatattgagttgattgagaaattgcagcaggtgaaactgatacattaataacaccatgaggaccaccattagttgcatcttgaatatctttaactatatcttttgattttgtaaaatcaatgaaaacttcaccacctaaagatttaacaaattcacccttttctgaaccaccatcaatacctaaaactcttaaacccattgctttagcatattgaacagctaatgaacctaaaccacctgcagcacctgaaattgcaacccattgacctggtcttaaatcagcagtttttaaagctttataaacagttataccagcacataaaattggtgcaacatgagctaaatctgtaccttttggaatttgagcagcttgaattgcatcagctgtagcatattgttggaaagaaccatcatgagtataaccagataaatctgcttgaggacaatttggttctgcaccttgttgacaaaattcacaacccatacaagaaccatttaaccatttaataccagcataatcaccaatttcaaaattagttacattagcaccttttgcaacaacaatacctgcaccttcatgaccaccaactaatggtaatttagttgctaaaggccaatcacctttccaagcatgtaaatcagtatgacaaacacctgaatatttaacattaattaaaatttcatttggttttggttttggaactggtatatctttataatgtaattcaccaccattttcataaaagataacacctttttgagtttttggaattgttggagcagcagttgctaaatttcttaaccaaatttgacgatttgaagttaatgaacgagttgttgaagtaattgattttgagaacataattaattgtaagttagttttggaaagagaataataaaaagtttaagtatatcaaaaagtataataataataagattaaataaggttaatgtagtagtagtattataattaaaataaaaaatgggaaattcaatggccttttataagaatagcataaaaagccaaatagatgaaagatcatacacaaaataatggaaacaccccctccaaatgggatagatagatacattaaagtggggggtgtaatgaaaatagtgcaaggacaaacggagagtttgataaagataataatagtatttactttactattagttagatctatgcttaaatagtattattacctctattgcattgaaccttataataataatttaatcatcaactccggtgtccgaataagtaatattacctaatacacaccccctcttttagtggggaaatagtatagtatagtatagtataataacttataaacagttattaatttaaccttaactataagtcacttaccgttatattgtttttatttaagtggagtattattaatatcagtattatggcttcttattggattataatataggctttttactttttattatgtaatgtacttttttattttgattttgttagaataagagctacttacggatatattgatcagtactgaaaccttgttctacatagacatacataataagatacctgtatctacatatacccattcccttcgtcgagttatgtaccagtggcaaaccaacagacacttgacggataataccggttgatggtcccttaccaatcatatcctggactatcaaccctacctaaattaacccatacatgacaaggtttggtgtataaatgagtgagaatcaatgaactttgatcattggtaggaaaaagtgaaaacctacaaattcttactcatttacccttgtgttagcacaaagttgcgtgcaaaaacctatggggtttattcaataggaaaacgctgacttttgccccatgtcataaataattgacttcaccttatcttatcttatatttcctttaacctcccaacgcaccatctataaattttgtatttgtttcaaaatatagttgattaagtaaattattgaaaatttcttgaactttcaatctttcaaatccaatacctttatgaattaaaatttcattataattataacgaatacttcttaaaaaacttctaattttccaaagtttattgaacctgtagcaaaataatctaataacataccagttatacctaaattaccatttttagccatcctataataagtttattgttagtattttgttttcctttaatagtatttgtctaaatgcaatattcaaattcaatttttcgtattcccaaatcttagcaaacagtcacacttcactccctaagtaatccatcattcattcaactgtctgacatttttcatcagaaccctactgacattttattcagtaaacaaaagaaggtacaacttacctttatccccaatcatcaactgtctgacatttttcatcagaaccctactgacattttattcagtaaacaagggaaagtgtaaaccacgtttatcactttataccccgaatcacacacccagtcctcaacacaatcctcactacaattacaacattcattccatcaatattcaacaaatcatcatctaaatcgtcaccaaatcaacgccaacatcattaatctaattcattcaatttattatatttatcatattcattatattccttcaattccttcaattccattcaattccactctattcattcaatccaatccagttacaatccagttacaatccagttacaatccagttccaatccagttccaatccagttccaatccagttccaatccagttccaatccagttccaatccagttccaatccagttccaatccagttccaatccagttccaatccagttccaatccagttccaatctaattaatttccagttaaaatccagtcataatccaatctggttaacatccagttataatccaattccagtctaattaacatccagttataaaccaatcataatcaaatccaggtatggttaattctagcagatttttttcaacatttaatgattacataatcacatgaaagaattatttcaatctaagattcattacatggaaatgaaattattcagattaattttccattaattattctaccttgatttaatcatctaataatccctaatatacatataccctactatctttaatgtttaaagttgggttggaaattcatacccaattacatacaagtaaaaaattattctcaaaatcttcaataccttcatttatttcaaataatacctttgatgataatacttcaaataataataaaaatgtttcatttcaagatttagcattacccggtactcaaccaattttaactccaaattcattaaattatgcaattaaattagctttatcattaaattgtaaaattaataaattttcaaattttgataggaaacattatttttatggtgatcaacctttaggttatcaaataactcaacattataatcctatagcttcgaatggtcaaataaaattatttaaacgtcataatcctaaattaaataaagatttattaattaatataattcaattacaattagaacaagatactggtagatcaatttatcattcaattaattcatcaaattctttcattgattttaatagaagtaatatttcattaattgaaatggttacagaaccaaattttactaatattgaagaaattagaagttttttacaatattatattaaattaattcaaaatttaaatatttcatcaggtgatttagagaatggttcaattagagttgatgttaatattaatattccaaatcatccaagagttgaaattaaaaatttaccaactatttcaagtattttaaatgcttgtaaatatgaatcaaatagacaatataatatattaaaggagggattaccaattgataattcaattcaaacaaggggttgggatggtaagaaaactttccatttacgtaataaagaatcaaatgttgattatagatatgtacctgatatggaattaccaattttaaaaatttcatcagatttaattaataaaattgaaaaatttgaaatgccaatttcaactgctgataaattagattatttaatgaataattataatttaaatattaaagatgctagaattttatttaataatgataaattattaaatttttatgaaatttgttataaaaatttaaataatgatccaaaatcacagaaaaaattaattaattggattaatcatgaattattaggttcattaacaaaatctgaattagaatttaatgaaaatattataaatgttgaatcatttattgaattaattaaattagttaataataataaaattactaatcaaaatggtaaattattattattacatttaattaataataaagatgatcaattaaaatcaattgaatcattagcaattgaatttgatatgattataacatctcaatcaattgatgattcaacttcaattataattgataatatattaaataaatataatgatattgtaattgaaattaaatcaactaaaccaaataaaattaattatttattaggtcaatgtatgaaagaattacgtggtaaagttcaaccaaatattataatgaatgaattaaagaaaagacttgatatataggatataatagtatagtatagtatataggatatacatgtagataataataaatgataatagatgtagaagaatagataaataaaaataaatgaatagaaaaatagatagagataaatgcattaataataattgagccgcctaattataacaaagaaaaaacacccccccatataataataataataataatttatatcatttacattcttcaaatggtaattcaccaaaagtattttcaccactatagacaacatataagaacccatcatcatccttatattgatcataaattgtactcattaaagcagcagttggtggtaaaatatctttaacgaatatgaaaatcgccttttcacttggtaaatgaattcttctacgtataacataaacaaattgtccaactgttaaatctgctggaacaagatatttacgtttatcaatatctggaatatcactatcagggatacgttcacagataactggaattctatcttgaaatttagaacaaattctttcagattcttcctttcttttctctatataatggatgttagtatgatgtttaaaatgtataaaacgtcttaatatcttataattacttaccaaatgagtggtcttctttaaattgtgatttcattgtctctttttagtataataataactagttgcaaaagaaagaagatcaagttaaaggaagaaacaaacaatagtaatgtgtcacaatttaaaatactgatatcgctgctcttctgataagcatttgctattattactattattattatcttattattgttattattactattgttattaatataatcactaatattacactataatacatttatacaatactatcagtcagctaggagatacgatatccatacaagacacataagggtagttaatattccaatttgtttataacttcgtacttcctgcaaaactaattcttcttttgctagtatcttttcaagtacttcatcttccttaactgtttctttaaccttctctactttctttggaataagtcgttctaaacgttccacggcctctaataatttggcctgtgtgttattattattgttattattattattcttatcattttccgactcaagttgttcaataacctctaaaagcgtgtcaataggttgtttaacgtcctttaattgtacttgtacttcttcccgtactgtgtcaatcactccctctacaggtctcatctcctgtttcaccactccaacatcatctctcttaatatctatcttattatccaatacatttttcttttcattagttaaatacggtaatggtaatggactaccaaaatcatacctctctcgtactttaggtttactacgtatattctccaatggtaatggatctccaatatcaacaaatcttttcttctgtggtaaataccccaatggtaatggttctccaataatatccttaactttcactttccccttaccacctttcacctcctccactctcctccatgtgtgctgactgtgtttagccactgtactgtccatgctatactctcccttaatataaacaacatgaaacgaaacagtctctataataaacaacattacgtaatgaaacctttcatttctcccaaccgccattttcaacattaaattttttcaactttaacaactgtaaagtcaagtgaagagtcttaaagggaagatcatagtatatatcagtggctcctattatagacaatgtcatctgctattcaacttcttaatcctaaggcggaatctgtccgtagagaacaagcattacaagttaatatatctgcagctattggattacaagatgttttagcatcaaatttaggtccaaagggtacattgaaaatgttagttgatggtgcaggtaatattaaaattacaaaagatggtaaaattttattaaatgaaatgcaaattcaaagtccaactgctataatgattgcacgtgccgcaagtgcacaagatgaaattactggtgatggtacaacaactgtttgtttattagttggtgaattattaagacaagcacaaattttcctcaatgaaggtatacatccaagagttttagttgatggatttgaaatttcaaaggatgaatcattaaaatttttaaatgattttgttattgataaaagggaagattttaaaaatttatcattaaatagagaattattattacaaattgcaagatcttcattacaaacaaaagttaataatgatttaactgaaattttaacaccaattgttacagatgctgttttaaatgtaattgattatgaaaatccaaaacaaattgatttacatatgattgaaataatgtcaatgatgcatgaaacttcaattaatactgaatttattaaaggtttagtattagatcatggtgcaagacatcctgatatgccaaaaaaagttaaaaatgctcatattttaattttaaatgtttcacttgaatatgagaaaactgaagttaattcaagtttttattattcaaatgctgaacaaagggaaaaattaattcaaaatgaaagaaaatttattgatgataaattaaagaaaattattgaattaaagaatagtattgttactgatgaaaattctggatttgttataataaatcaaaaaggtatagatccaatgagtttagatatattagctaaaaataatattttagcattaagaagggcaaagagaagaaatatggaaagattacaattaatttgtggtggtgaagcacaaaattctgttgatgatttaaatacttcaattttaggattttcaggtttagtttatgaaacttcaattggtgaagaaaaatttacttatgttacagaaaatgttaatccaaaatcttgtacaattttaattaaaggtgcacataattatattattcaacaaactaaagatgctgttagagatggtttaagagctgtatcaaatgcaattaaagattcttgtttagtacctggtgcaggtgcattttggatttcttgtcataaacatttaattgaaaataaattaattaataaaggcaaaaataaacctggtattaaagctttcagtgattcacttttaattatacctaaaactttatgtaaaaatgctggtttagatgttttagattcaatatctcaagctcaagatgaaattgatgatggtcaaattgttggtattgatttaaattctggtgaacctttagatccaacaattgatggtatttgggattcttttagagttttaagaaatgcaatttcaagtgcaactggtatagcttcaaatttattattatgtgatgaattattaaaagctggtaaatcttcacttaaagaataatgatcataattataatcatactaatgttttataaaaatctttttataacttaaacatctataaaattttgtttaaataaaaatcttctacattgataaaataataatattatgtatacccacccatatttcattaacctttaacacttacaataaatttcgatttaaccgttcgttcattatttttgatagagtttaattcaattattcgatcttcaatatttttcatttctttcatattatttgctaaatatgcaagtctctctaattccatcaactttttattgaatcctctcttccattcaatatatgaattaaaacttttaaaatatttcaaaccataagaatcttcatcatctatatcaccaatctcactgattttattatcatatatacaaaaccaattgccatttctatcccatatagtaatacctttaaatttttcacataatgaacattcaagttttgtaggtatttcaatcccacttaattttcttgctcttggtggtaaactagttgaattaacggtaaatccactattagaattatcattatcactaccatctttgttatatacaacatcatctaatgggaataatattttttgaattaaatttggtaaccatctagataattgaaaccaaccccaaaaaacacctggattttgtgaatgataatcattatcaaaatctggtgattgcttgggaaaacttctatagaaaaattcactcggttgaggtggtgaaccaccatttgtccaattaccttgaggtactaaaggtgataaaattcgtacaattgatgatgaaaaactttcatgtggtgatttaatattgatatcatttggtagaaaagtatgaaataaatggatatatcgatgataatttaaatttaagaattcacttgataggatttcatttcgactcttatcatcaattaatggataatttgatggtatccaattaggatatgcatgtgtaacatgaaaatataatgcatccgaaatcggagacagtttagctaaatgtagtactataggatcatcatattgaattgaaaactcataaaacatattcttagtattgttatatataagtttcactatctacttaggtatattatctgataacggatggttctatctaagtgaaatcaaacaccatccaaacagcaatgagatcaagtcaatccaccccggaagagtttaaaattgattttttttccgtgtcaaaataatttttcactttctttaatgggtgattacgtactgtgtttgaaaattgactcttgaatcatccaggtacaacttaatggtatagatattacattgatattgtaataaagttgtaaatccatgtaataaagttgtaaacttctacctaatatctacctctaggaccaaacaatacttcgtctatataagaactataaatactataactaactaaactataatgtaactaataacctaatgttgtactctaacttcataggattacgtaagtacatattgaggactatattacagatattatgatatacagtgctagctattaaattatttattactataagcctcttgcagttccttttcgtgcttcttttgcatttgttccattaatttacggaattctgctcgaagaattgaaactgagacaggtgaaacaggtgatgatggtgtagatggtattgatgaacaattagtttttggactttcagggaatatactcggattagctgcactgtttggtggtgacattaacgtgcttaccggtaataaacctaaataatcaactttaaataaattattttgcagttgtaatttatgcatctctttattcatcatatcaattcttttctcatactcaacattcttactctctgccttcagtaattcatttgtacatctagccagttcatcattactctttttcaataattcttcacatttctcatatttacttgtcatcagattagcatatttaacatgatgtgacatttcttcctcatatttctttgtaagataattatgtgcaaattgtaaatcattcaaggcagtttcagtcttgtttttattactgttattatcattcttgttatctgttattggtgtagtacttttatttccattattatctgcaattttatagatacattctttaagccatttcatacgtgtatccatattcgtcatccctctttcatcaaattcaggtaaattgatatttttctgtactgcaattgtaagtaaaatactaagtaattcaccaacgagtctttcattatcattaacatcactctttgatttatcatttgtcgatatatctaattcactaatatacccaagtttcattaattctacataatgtcttaacaatttactatcagttatttgaccaagcgattcttttaaactttcataattcaatattttcttattttgttcattgttcgaattaaattttagttcatattcaagtaaacttctttcaataagtatattaagatcaacagaatcagtaatactactaccatcactcattgaaatcatatcatcttcaatggtgttggataaattagttgtatattcatctaaataactattaccaataaaatcaggctcattatttttcaatgattgaaatccgtgttgtaaaaatccgaaaacatcatcaacaccctgtaatttatcaacatgttccagtcctgctgtatttgtcctatccaataacgatattgctgagatcatcttccttttgttacttaatgaaaacaaacaaagaaaaaagcagttgttgttgttcctgtgaaaaagattccatctgatcgatttttgattcagaatattttttttccataacaacgcgttctgtacgtctaatctaataatttttactataatctaagcagtttctaaaaagtttataaattctatttctatacacatacaattctaaataaggtctttatatttattataaacttcatcaattgcattataaatttcttcctttcttttatcatcaataaaactaccataaacaccatttttagcaattttaacccattcttcaccagttaattgaaatctatcttcaattgcaatataattatctaaaatataaccaccaaaataagctggatcatcagaattaatactaaatggaacattaaattctaaaaatttacgaattggtaattctttaacatcattaacaacttgtaatttaacattacttaatggacaaacacttaacataattttattatctgctaatcttttcaataactcatcatctctatgactttgaacaccatgatcaattcttgtaacatttaataaatctaatgaattagttataaaaattggatcagcttcttcacctgcatgagcagttaataaagcatttggatgattctctttaactaacttataacaactttcaaataattcaggtgggaaaggtttctctgatgaatctaatcctaaaccatgaatagtaccatcattataatatttatgagcagatttaattgtttcaatacaatttggaactggtaaatgtcttaataaacacataattaatttagttgaaatttttaattcttcttcagcctttttacatgctttatttaaaccattaacaactgtttcaattgaaatcccacgttcaacatgtccttgaggatcaaagaaaacttcagtatgatgtaaaccatcacttttagcttttttaaaatattcatatgctagatcctcaaaatcttgttcattaattaaaactgacataccaatataataatgatcaaggaaatcttgtaaatctgcaaagttatcatatctttcattacataattcaacacttgcagggaaatgatcaggtaatgtaatattatttctctttgctaatgaaaataaaagttcaggtgacagagtaccttcaacatgaacatgatgttcacattttggtaattcatgtaaaaatttatgtttatgttcagaaatattacaagacatttttattgatattgatatctaatatttatattatatagcaaagcaaacaagagttagtaagaccaaagaataaaagaaaagtaaagaaaaaagaagcaatgaaaattcaccaagaaaaaaaaataattcatgattaaagggtaaaaaaaaatattttttttctttttctccaagagataacaaacaaaaacatcaaatttttcttatcaacggaactaaattgaacttgtgtgattccttttattgttttcatgtttctaatcttgcttctctcattgcatatagttattagtgttagtattgtatgattgagtaagtacattgataagcttaaatccaggtaatcatcaagcgaaaaagctgatgaaccaagggacttttctccccgcggttagcacttattgtaaagatcggaagctaacaatgcagctccgacgtggtccgtaaacatgaatagaatacctaatactggtatactttcaagccaaacacagaccataccaaatttaaacaattcaccctctgcatctttacccttataaacaatttgacgtggtctctgtcttgttaattgcatcattctctgttgactttgtttaccaatattaagtgaattattataatgaaaggctaaagtaccaataattggtattgttgcaattataattgaataaagaattttagtaacagttatagtaattgaaattggatttatatccattaattgtgcaacaattgtttgaggaactaatcttttcaatttaccaggtataacaactctatcaagtccatttaaacataaagttgtatcgaaaactttattcaatttccccttaattaaataatttttgaaaatttgattattaacagaactacattgttggaaagttgtaacaattgcaatatgaatacctaatggaccatacattaatgcattgataattaaattcaatgggaatattgcaccaaataaaattgtataaacataacaatgtagtaaaccatatggaataattacagataagaaaattggaaggaattgatcataatttgaccaaaagaagtaaaatcctttgaaaggatagagataagattgatctgttaaggaaaatatttgagttgctacaatgaatggtcttgaaatttccattataatacgttgttgaacggcattttgccaatcaatatgtaatgcagtggacattcctttgaccagaagaggaagcaaataataaaaagagatacacttacaatacaatacaattggatgagccgtgaacaaaatttgaaataatttgaaaatattgccccttttttctccattatagtaaaatttaaatgattagaagagatgatatagatacaaattgttatatgatttatattaatattaataagtctattgtgatttatttatgtaaatgcatttaatcgaataaaccgaaacccatatcatcatcggattcttcagcttcttcttcagcttcttcagctgcagcttcttcagaagcacctgcagcagcaccggatgcagcagcacctgcaccaccaactggagcagcagaaatcttttcattaccttcagcaattaattcttcaactgatttaccttctaattcagagattaatttgtctaatttttcagattcaacttcaataccaacggatgaaagaactgatgagacatcatcagcagttggtgcggttttaccggagttgactaaaagtaagtaagcagcaagatacttcattatttatgtatgacgatagaaacaaattcaaaagattttaagtcaatatcaacatcgaaattcaaataaaatttcaataaagcatgctaaaaaatattccatatagtattatatcatcaactaatagtaaatcttcccaagtgaacgcttacttagtgaggatattgaaaaatatttagaaaatatgggaaattcttacaacattggtggtttgagggtgtatagtacggtgaccggcaattgtgcttttattgtgcggtgtgcgggttatttcttattattttgtgcgtcttattaccgcattaggcaacataggaaatcattagaaaaaattagaaaagaaaattccaacagagcgagagttccctcccactgctctcccgatcagtgtctcccccagtgtctgttccccagtaccagcgctgaaggtgaaaataatttttctattgactgttgaaggatataccctattaagaatttaatattagtgataatttatcatcattttactaaaattattttgaaattattttgaaattattttgaaattatttcatattttttaaaagactaagacttactttcaatagatcaactaacaatcatgtctaccagtatgtattacatatatcacatacacaatctaatcaacctataatgaaatgctgtctgaaaaattgaatccatatatttaatatgaaattattgaatgaattacgatatatactgcaatacacactaagattatacccatttttacatgaaatatgaaatatacatcatatcatatataccgttataataccacattgaatcatttaaaatcatattacgtgtatgaaattattgaagacagcattttatatctttgaaaaatattttacaagtaacataatactaacataattactcctaatcactattttttttattacagctgaacaaagaaagaagagatccttcaagtcattcacattcaagggtgttgaactcgaacaattattagaattatcaactgaagactttgcaaaattatgtgatgctagagttagaagaagattctcaagaggtttaggttcaaacactatgcacttaattaaaaaattaagagctgcaaaattaaatgctccagcaaatgaaaaaccagctgttgttaaaactcatttaagaaatatgattgttgttccagaaatgattggttcagttattggtatttacaacggtaaagttttcaacactgttgaaattaaagctgaaatggttggtcattacttaggtgaattctctattacttataacccagttcaacatggtaaggcttctgctggttctaaattaagattatactaatcatgctttttattaaataaaaattatattgttttgtattgtataaatcttatccatctatctttttaaattaaaagaaaaaaaaattaatattaagttaacatcaaatatactagcgtattattatattaaattcattaaattacttattattatacattattatacttcttttttcattttgattcctaattcctttaaatcagaatcaatttcattttctgaacatccacttaaattatttaatgaacttggtattatttgtttataatttattaaaccttgtaaaatacttaattctttgaaaactgaatttctttgatgtgttaaaattggtacatattgattaatattaaattcattaattaattgattaaattgataataatcaggtaaattcaatgtttccatatccatcattcttctctctttattaatatcataccaatcagttgtaattttaacaatttcatttgtctttaaatcttgtcgaagttttaaaaattgttgatgtaatgaaattctattagctctggtttgattatctaaacattttaatttatatttttgtaaattcattaatctttcagttttctttttaaaatcttcatcaaccatcttcatataatcaattaaatcaggatgttgattattttcacataattttaattcaaattcaagttttgttaattgtgtctcatataatttatcctttaattttgcaaatttaatctctatattctttaatccattcattgcattatttctttgttcttccttttcattctcatcaatttcagcatctgtatcccttccctcatcatgtgattctccttctccttctctttctccattacctccttcactgtttttctctgttttaacttctttcttattttgattcacatcatcatcaccagtatgatctatacctttttcgccatctttttccattttattatctctctcctcttcttccttagtttcatcttcatcatcaccttcatcatcctcaccttctgcatcattatcatcatttattgcatttaattcaacagctgtattatctttatcagttatcgcatattcatcatcattattattttctttatcattgatatcatcaccacttgctactttttgttttttacttaaatgttgatcataatgttcatcattatcaacattatgatgattaagaccatttgtcttcttcaaagtaggacttgatactgttacatttaatgatcttttaccatttgacataatttctaattgactatcacgatcatcaattccttccattttatcagtttcagcatcactagatggtggttccttatcctctcttctagcaaatggcattatattgtccctgtaagtaatgttaaattccaaacagtaaataatattaccgatcaatatagaatattaatttaatcagttttgtgaaaactgcaatgtgaaaacaatagaaaaaaaatttatgattacgtaagtatactatattctatagaaaatgaaaataaaagatctctatttctttgctttgttaccactactacctcttggtttgctaccatttggtttgctaccatctttgttattaactggcttaccctttccaccaggtttggcagctgcctctgcttcaagtttttcacggaatgctctacttctactagtaattttagcatctttctctcttctttccttacgacctccatgtctcttcttatcaactttaccacctttaccaattggtgttttacccttagttgcacgttcaccttcaacaactaatttacctaatgttctacgatcggttttacctaattgttttgcccttccaacaactgtcttttgtttatcatttaatttagaaaattttgaacgcattgtttcattattacgcattgtctttttacatctagttattcttaatgttctcttattattcatttttttatcatctaataataatgcttttgtaacataatttgaatcaataaattgaacaattgcaaatcctttaccatatgaagttttagaatctctaattatacgaacattatcaataacatttttcaaacctgtatctctttcactatttgaaatacattttttattaaaatatttccataaagtttcttccttttcttggaaatctaaattaccaacaaaaattgataatttattatcctttttatttggatgtgttaaatgatcaactctaagatgatgatctttataaacttgtccatttaattttaatgctttaagtgaatcttccttatttttgaaaacaacataactattcataacattctctaaatcaacttctttacttataaatgcaactttacgtggtgcagtagttgttgaatgaattgatctaaatcgtatagaatcaattaaacttgtatgttctggacaattaagaaatttattaataaataatttaaaatcttttgtttctctcttatttgacataattatagctggaacattaccaatgaaaattgtacgttctgctttttcaaattctttatcctttaaatcaagaatttttgctgcaccaccaactttagactcagtagtttcaccctctgttatagtttctgcgtcaacatccatttcaccatcttcagttttttcatcagatttatcatcagatttctcatcgttctcttctttttcgtcttcgtcttcttcttcactttcttcatcttcatcttcatcaactaatttagacatatacttactttctagatctggattttcttccttttcttcatcagaatcaacatccattgcatcaccatcaactggtttagaatcaacattttcttcttcagcttctacttcttcttcaacaggtgcatttttttcctgtcttctcttttcctttctttcctttttcttcaattgaacaatagttctagtcttttcagcaactatcttctcattatcaatgacactaggcttagcaaataatccagacatcgttccctgtcctctgtaaatgaacctttcactactaaaacattataagaaatttaagaaatttgaaaaaaaaaattttatctactttcccatttaggaaagtcgtgcaaagaaaagaaaaaacgaccgactgatcgacgcactgcttttgccacatttcttatctttaactgagatagtggctcaatatctacttttttacgttttgtactttactggtttctctttcttgaacttattagagggcaaatgggtcaatctgcctcaaaacaactcaacaacaacaacaacaacaagaaaccaacttatgtctctgcattaccttccagtgatgcagatgatgaactaatctacaaattacaaactttacttaatgtcgacgataatgatagtgatgatgatgaatctgatgataagatttctaaatctccattaaatacccttaatttatcagaatggaaggaaaatattttagctgacccaactaaaaaattagcaatgaattgtatgacaggtaatgatattgataaaattattgcaaatactgaaaagcaaaatttaaataatattgatttatttaattataatgttaaatttgaaggtcatccaattacaaatcaaaaatcttcaggtagatgttggttatttgcttcaactaatgttttcaaagaatttatgaaatcaaattataatttagaagatttcgaattctcacaaaattatttatacttttatgataagttagagaaatgtaattggtttttaaatagaattttagaaagttatgaagatgaaattgattcaagatatattcaatttttatttcaattacctgaaaatgatggtggtcaatgggatatgattgttaatttagttaatacttatgggttagttccaaaatcaatttatccagattctgcatcttcaattaattcatcaagattaaattattttattaataataaattaagagaatttgcaattgttttaagaaatttaaagaaagaagaaaattcaaattcagagaaaattgattcaaaatcttcaaatattgaaattgttaaaaaaaatatgttaaaggaaattcatacaattttaagtttaacattaggtataccacctgatccaaatgattcaattgtttgggaatataaggataaatttggtaattatcataaaattgattcaactcctttagatttttataataatgttttaaattttaaagcacatgaacatttttcattaattaatgatccaagaaatttagaaggtttatatactgttgataaattaggtaatattgaaaatggtaaaccaattgaatatgttaatacctcaattgataatttaaaggaagctgcaattcaaatgattaaatcaaatatacctgttttctttggttcagatgttggaaaatttgaagatactcaaattggtttattagatgttgaatcatgggattataatttaggttttggtatcgatatgaaattaactaaaaagcaaagattattaacaggttcatcacaaatgactcatgcaatggttttaacaggtgttcatttaattgatggtaaaccaattagatggaaagttgaaaattcttggggtgaatatggtaatcataaaggttattttataatgtcagataaatggtttgatgaatatgttttccaaattgttacaaatgaaacttttacaaagaaaaaattagttgatatttggaaatcaaaggaatataaagttttaccatattatgatccaatgggtgcattagcttaaaaagtaccattttacattatctatatccattatcattatttttttattattgattactattacacattatttggttaattagatttataaactcttctcttttcgttttttttacctacgtataactttttttaaaacccctcttttagtatacttaacaccgtctgaacctattttaacacctttaccaacaatatcattaaaagctggtattgcaccattaacatgataaagaggattttgaatttcttcattaaatgtatgtttatgttttaccttaattttatgtttactttttttatgtttatttccattaatttgtctattatcataatcgtttgataaactccaatcaactccaattgtttcccaaactgatgcagctatatattttggcattttacgtccatataaacattgatcaatcatccacataccaacaataaattcttcacatgttaatgtaccatcatcaaataattcacgatcagtttcaaaaaaatcataactaaatgttatctcatttgaaggttttagcttctttatattgttaatgtctgttgttggaacttgtaaaatattactatcattatgttcttcaggtatgttagattcgttatgatctttatgatcttcatcactacaggtatcactcccaatatcactatcactatcacaatcgctttcattttcactttgatcttgggtttccaattcattttcattttcattttcattttcattttcactttggttttcatcaccttcaataattttctcagttgatccattacgtgaaattgatggtataataatttcctttgttaaccattcaatattaccactattaacatacttaatccactttcttttcctatcatctaaaactaaactccaaattttcattaaggttgttatatctaatttagatcttaaccaaatttctcttactacaattccatgaattctttcatttttatcactataagtattaacaaattcagataatactaaatctttattatctttatcattttctttagatagtctgatatctaaatcaaggtataaatttttatttgcagcaaaaacaccttcatatcttttcctttcatctgatgtaattatatttaaattaccacgatcatgatttttccaaggtttatcttcattaaattcatgtttatttttaataactctaccaaatccatttcttttctcattatttcttaaagttgttttgaatactaattgttgagcgggtatagtttgttggtatatattagtattactattgtttggataattggtaattgagtgagaatgtaaattagtagtagagtcataaattgaatgattatcaataaatgaaggtgcagttgatggtagaattgaatcattaattgaatcacttaaattcatttgattaacatgttgaggtaacattgaagttgaatttgaatattgatgattataatttctacgttcacgttcacgttcttctctaatattctttggtgtaaagaaatttgtcagtttttgtgatgctgatgttggtgctttattagatactattgaatgagaatcaaaactatgatattgttgtaaattcggactagtttctatatttattgaaatatttgaatttacattcatattgctagtaccaagattatcataatgctggttattattattaacgttattgacattgttattactatcaatcgatatttcagaagtatcagtagttgtagataatgttctaggtggaggtggtggtttccttattgtcctgtttttccttaattgatttaaattcccaccgtctagtgatgtattaaaattatcattcaatgaagaatttttatagttagtcaaatgatttaaatttgaattattaactttaactaactttggtgatgaattatatgaaacaaatgatgaaggattattttttgcaattgatgcagcagcagctaatgcagttgaagaagatgaattatttaaatcattccatactgtactaccagattgtgagtcaggtaattgtctggcattagtattattattagtattagtattgatattaatactagtactgctattattagtaacattttgatctgaatcatgtcgtttgggtatttttggtgattggggagttcttaatgatttcaaatgtttaggttcatgtgatagaattggtgaagaatctatatgatcagtaataacgacaggtcttcttctatattcatgttgtttaattgatccctgttttaatgtacctgtattatttacactatttgatgaattataagcagaagcagaagcggcagccgcctgagcagccagcaaagcagaagaagaaggtttcaccattgatgacaatacgcctccttcattagtcattgtaattgagcaattgcagatatatacacttccccagaagatcgtttccctatttgccaacacttgagatgtcccaagccatcgtgaaataaaataaaataaaaatatttatgtaatcaacttatatttgaaacttaattggtgcacagattgagaaaaggaaaaaaaatttctttttctgagagatagctactatttacatgaaattttgatgttttttttagatttaatggttgaaaagttttttttattttgtttttgattttaattttcacttaattgttacttcaatttagtagatatcacatagtaatgactgaggaagtaaaaaaagagtcttatgcaactgataagaaatcactggcattcagtgaacaacattatttttcgtcatatgaccattttggtattcatgaagaaatgttaaaagatcgtgttagaactttatcatatagaaatgcaattatgaagaataaacatttatttaaggataagattgttcttgatgttggttgtggtaccggtgttttaagtatgtttgcagctcaagcaggtgcaaaacatgttttagcagttgatatgtcaaatattatcgaaatggcacaaaaagttattgatcttaatggttttagtgataaaattacattattcagaggtaaattagaggatgttaaattaccttatgataaagttgatattattattagtgaatggatgggatatttcttattatatgagtcaatgttagatactgttttaattgcaagagatttatatttaaaggaaggtggtttaatattccctgataaggcaagtattcatgttgcaatgattgaagatgaagaatataaaaatgataaaattcatttttgggaagattcaatgcaattatatggttttgattattcaccatttgttaaaattgcaatgtcagaacctttagttgatattgttgataatggttcagttgttacaagtcataataaaattattgaatttgatcttaatactgttaaaattgaagatttagcatttcataaagaatttaaattaaaagcaactagagatgataaagttcatgcattattatcatggtttgatattgatttcccatctgatacaaaggaaaatatcgttactttttcaactggtgctcatgcaacttatactcattggaaacaaactgttttctatcttgatcaagtattagatgttaaaaagggtgaagaaattacaggctcaattgcttcaagaccaaatgaatttaataatagagaattagatattgaacttgattggaattttaaggcaagtggtgaaaatgattcacgtaaacaatctggtaaatataattatttcttacgttaaatatcaaaatcatctgtgtaatctttataaattattttctaatagaaatatagaacagaaagttaaaaaaatgaattctaaagtgaaaaaacgtgtatgataagtaaaataagtaagaatttaattttatctcagaactatttgaaaccaaaaaaagatttcttatcatagactagacatgcttttattctctgaagcaagtttcatatcttaaaagcttaattaatagcaaataaaaggaacgatttggccatactatagtaacctataaaacaaagattttctattatcataaacaccgcgatttcggagatactcctatatcaattttgtacctattttgaattttattgttaaataataattctgttttctcttctctgttgtacattctgttatcttaaacaatagaaacaattattaaataatggaatctcaaccgcaatctcaagatatattctctatcgatgatgattttaattctttgtatattaaccggaagattaaaccgctttacaaatacattatggcatctttaataatttcaattgtttctataacgttattgttctttttcaaagcatcaacaggatccgaagtattagcaacaaatcattataattataatcttaatgaaaaagtaactcttgatgatcaatattcaattgataatttagagaaacttttctatactaataaagggataactcatgatgtattcgttaaaaaaattcattcacataatgattattggagaaatacaccattattagacgcaatttcattaggtgttcaatcagttgaagcagatgtttggtattttcctgaaagtaatgatgaaacagtttatgttggacattcaatgaaatctttgaaaaaaggtgttacattagattcattatatattaatccattaaatgcaatacttaaaggttcaaataataaacaagatgattcagctgatattataattaaagacaatgatgatataaatggagttttcgatactgatcatgaaacgacattatatttatttattgatttaaaaactgatggtaatcaattatttgataaaattcattcaaaatttcaaaattttcataataataaatggttaagttattataatgaaacaagtgatgaattcaaatggggaccaattacaattattggtaccggtaataccccattggataaagttaaaaaccaaggtgaaattaggtatattttctttgatggtccattaaataaattaaaggaggtaagtgaagatgaaattaattataaggttagtccaattgtatcatcgtcgttaagaatattagtacaacatttggaaattaccgatttattaaatgatgatcaagttaaaaatattaaagaattagtcgaaattgctcataaaggtaatatgaagacaagaatttgggatactccatggtggccagttaatttggaaaggggtatttggagacaaattattaatgatattaaatcagactatttgaatgttgatgatttagtagaaggtgttgagttcaagtggtgacgaataaatttaaccaattataatgttatgatggggtaataagcgaacatactaggaaactgcataaaatccggaaagtttaaaaaaggttttgatgaaagtttaagttaaaatagtgctattattagagtttttcaaagttgtttagttaatcaatatgatgtatataccttcgtatttattgttaaaattttaatgaactggtgtcatatccactccccacatcgtctgattgtttttatatgatatatcaccataacactacctttattgaacaacttattaataattaattattagtttgatatacctatcacttcaatcagcatactgttgaaatacctaattcagtattgatattaataacttaacgaataatcccattaaacacaatgcaaaataatctcggtgttaacattgtccgtatatggtcaactatattaaaattaaccgaataccaagtaaatagcactctataaactaaccctccactgattgttaacactgctattatcccgagtggaaaattagttaaaaagtgagaaaagagaaaattagccggaaattattcggagttgtaaaaacagttcgcactaatttaatgccgattaccggctattttagttaataaaattttagttaatgcagcatgagttacttttacgagtatctgggaattgctctgaagtttatctctggtataataacaattcatcctttgttgatagaattatcaattgactaagatgacgtaatttatatcatagtaataagggttttaaattttcaagcgataatgtattgtaaaattatttagggtaaacatagtaataacaaagaaaaaaattgaaaaatcagagagaagattagggaaggccaagaagtgaacgtgaaaagtaaatgtaaatgaaaatgaaaaattattaaaatgcaaaccagcaattgtgaaaagtttttgatttagtatgttccaagtactatggtcaaaaaattttgtaaattggtggctggtcttgataattttttttgtaggattgcattagaaaattgataagaaaaattaaaattgcaaaatttcattgtaattactattccatactatattattatgattgttttattaagtttcatttatctaactgttacattcgataagatagataactgttccaaggttaactaaagtaacataaatgtaagtaaattaaatgaatgaaaaatgaaacaatgaaaaataatgatagtagtaataataatcaataataaaacataaatgaaattgtaattagtatgaaataaaatgaaataaaatatttgatgaatagtgattgcaattaactgaatttgtggaaaagaaaaataggaaaatatggattgtcaatttgaaggaaaaaaaaataacgattgtgatgttttgaatcatgaaattatgataaatcattgtaaaatttaaattaaataaatgttaaacttaaataccatttaaggttgcagaatcttttggttcaagaacatttaatttatagaaataacttgtatcaccttgaagatcaacattaccagctggtaaataatcacaaacaatataataaccatatggtgtaccacaatttttataaccacaaccaacttgagttgtatctttccaaactaattgagtaaaatgaccagttgaagcatcaaattttggatcactataattataatatctaatttcattaaaccatccttcaactgcaccagcattttcaaaattataaccataagctaaattttcacctaaatcttcaccatttaattcgaaattattatgtctaaaaacaccatcacattgccaatcatctgcagcttgttgagtaagttgtgcaatttgattattccaagttaatggtccagtatcttccattaaacttctaagttcattatgtttagctaaataaacatcttcaaatgaaaattgagttgaagttgcagttggggttgcagttgatgaagtagatgtagttgatgaagtagttgaagtagttgaagtagttgaagtggatgaagtggttgaagaagttgaagtagttgatgttgaagaagttgaagtagttgaagtagtaggttcagtagttgatgaagatgtagtttcagtagcttgttgtccagctgcagtttcttcagttgtagcttcagtagtttcagttgaagatgaagatgtagtaattggagttgaacttgtagtagaagatgatgagcttactgaagtaattgctccaacaagtggaatattagtaattgaatattcagttgttgtttttgtagttgcacaatcagcaattgaagattgaacacttgcagcattaacagctgaaattgataaaataacggaagagagaagagaatttgaaaacttcattttgttaataagtattattcgaatgggtatccccgtaaagtattgaggattaagtgtgatttaaaaagataaaggattaaaaatcaattcaaaaaaagagtaacgtagctattcaatattatttaagatagaagaagataaagaaaaaggtggaattacttctctatataagagggatatgataaattataacatgttgttgataatgataattaatattaataataaccactattaaattgacatttccaatttatcagaagaaaaacacaagataatatagtttaagtataatacgatccagcacagagcaacctgcccataaacgaacaataggaaatagagtttattctatttagcgctaaatgcttttcacacaagaaatcagcactgtaaacaatagacaacaatagttaataataaggaacaataggaaagcttcttttccagcttttcatagctctcttttacccgccttaattttagtttcaaattgtttcactttgtttcactttatttcaatttatttcactttatttaaactttcccacaataagtgacaaatccggtatatttgacatatagtgcgaatctttttcaaatcttgaattttgtttcttcaagcagaattagttttattgtctatttatgacggacaaattgtttagcttcactatggtttgtattgtagagcttcggaaaaatcatatgagtttctattctcactggcattatcatctttgatgacgtcttattagtatcaatttcatcattattaaattctcaatttgacattatgcactgttcatcatcaatttctatcggatagtgccagaattattcattatacctacacctcggggccatatcaaatacggtaaccccggtggggataggattattaaccggagttatcattttaggaaaggtaccggagtgtgtgttatgggtttatacccccggttacctggaggctcaggtgaataagaggtcgatatatgactaatctagaattggacgtgaagtattggatattcggtatatgcagatagaggtatcttagtaattagagttttatagaacaaggttttatcactaatcaatatcctcagctcttattctgacagatagcctagagaatcttttcgggggaaaaccccgtcaatatgtgagatagatctattaatgtctcaaaaaaattctaaccatgcgttcagaattccaaagatttgatgattgttatggatccacaaatcataattcaaaaaattcaaacacataacaccaattttaaatataagaaactagtaattcgtcaacaatccgaagaattcaataacaaaatataatctgaaaataattatggaaagatttaattaatgggacatgacttcaatcatcttccataaaagtgatatacggatttatcaattaaattatcttaattttgaacccttaaaatatccaaacataaaatttcccatgtaccaaattaataaacagcctaataaataaattttgttcatcccaccgatattattcaatgtattatttaaaactctactaataacatgaaatattaattcactgtaaatcatactcttatattgattactttgcccattattaaaacatatctcccattctaaacattcttcctttaatgctggtaattgaccatattctgagcatttatttaaagtatattctcggaaacattgatctttttgaagctctagtctaacatttaatttatcatattcaatacgaaaatcttctcttattgtttgcaatacattatatccaataattaatataatagaataattaatacttttcttcaattgttcaaatatagatatattactcctataagatacttcacttttaatgtcatctgcattatactcataatcatcatcatattcattcttattatgttcactatttgtaatcatttgataatttgaactattatacctcctggttataccatcaccagtattaatattgtaaaaatgattatgaataataatgtttctatcatcaaacttctttaaatcgtcatttcgtattaaatcctgatctccatttgatttaccatttattacttgacttaacgcgtacccttgtgattctggtgataaaatatttccaagattgaatttattattattattgttatcttcgttatcattttgctcttgtatttcatcatcaacatggtcattactgtctctatagtacatactataatcctcatgttgattatgagtgggtacaatatcttcatcactgtaatctctcatactaatatcatcatcttcatattcttcattgtctatagttattgatgttttactgtttgagtctaacgacatcttatacgctatatcactaataagttcatcatctattatgtaattgctcattgattgtccaagactttatctaaagaaaagttattgattcagtgttaaaataccaaattgcagaatttctagtgaaattgaattatttttgccatttcattacgtaatttgggtggtattacccttttgagaaatctaaaaaaatttcatgttaatttttttttcttaaaacttgattttgataaaggaattttccagttgatagaaaagtatatttcttattgcagactgatatcatacaatgggttctagtagaaaaaagaaggagaagaagaaggattttgtcaaaccaaaattaaaggttggtaaaacacttgctaaaaatgctaatcatacatcaactgaatttaaagcaaaaaaaattaatgtttcatcatcaattaaacatttaataacaactaaaaatgactcttcaattgaatatattaagaaactttcagttttgaagaaaacaacaactaatttaacttcaagaaaggaaattttagctgaattcttaacaattttgcaaaaagatccaatgcaagaaactcataaagtaccgttagatgaattaattaaagttataagagttttattcttagatcaatcaaaaaaaatacgtactgatgcaagagaaattttatcacaattaattaaacatcataataatttaattgtcttaaatcatgattcattaatgttattcattttcagtgcaatgacccatttaaagccaacaattagacaagattcaatttttacattaagagagattttaaatggtggtgagagattacgtagcttaactatatcaaatcattggatacgtgtttggaaaaatatgttagttttacttaattggaaaaaagaaaataaatcatatgttgattcaaatgattttaaagattttgatggtatgagattacaacaattaacatttttaaatgattttcttaattttggttgtattcaagaaaaaacaaatgaagaagaagatgatgataattcaataattcaacagcatgatttattatcaacttatatgattaaaccaaatatgggtatgttatatcgtaatttaaaactttctggtaatataagtattattcaaactacaaataccaataataatgtggtatcaactgaaaaaagtgattttgatgatgacagtaatgatttagataatacaatgttatgtgaagatgttaatgatagaattaaagtttttattgatggattttatgaatctattcataatggtttaacagattttactaaagttgaagataaaaaattggttttattagctgataatattttgaaaaatattgataaagtgaaattaaagtatattgaaatacaggattagttaatgtctattttattagtttataaatgtgtttagaaaagaaattatatattattagttagtaacaggtttggaacttgattcttcaggtggcgcatctgagtcactatctgaatctgaacttgaatctgaatcactgctggaatctgaatctgaatcactatcagaggaactagattcatcaactaaagtgtctttataatcaacaaattttaaatcttcaaaatttgatatattctctgttgtaatgtacaaagttgggaactcgatgacaactctatttgctaatgcatcagataataataaatcatgtgggaatgtaacaaatctattattttcaacatctttaaagaaaatattatattctgcaccttcagctatccaatctttcggtttaagctcatccagtgttgaagattctaatgatttatatctaacatatttttgtaaaactttcattttgttatcaaccattaaccattcaactgtccagaaccaatttttttgtttcctaccagatttattcattctccctctctccattccaaatggaagtttcttgactcgtacattttgtagaataatctcttgtttattattcaacttcttcctgttattgttattattactgttcgaatgagttggttttaaaattttcaactcagttttctgtcgtttggatagctctaaatttctattcatttttagtaaaaagttataatctctttgaacatcattttggtcaatttcatttttttttatataagtatctcttgttcctgatgaaacatcactcattccggaacatgatttttcaattttatgttttttgaaacatggtaatgaacatgtatgtaatttacatctcggacatacatatttatgttcgttttccaagcatatttcacacttctgtttcaccacttcgctcattcaataatggtgtaattgagcaaccttttgattcagataaaaacttaacaaaatttaaaacaaaatttccatgttaagagaaaatagattgaaaaaaaatatttttcaaattacgtaatattataaaaatgaatcaacgcgttggcaacagaagtcgtctttatgtgtagatttaaatgttagtagctatcactgtttctttctgaggggaataaacaggattaaacagtaggcatgtcactttgggcagataaatatagacctaatactttggaaaaactttcatatcacgatgaagtcactgaacaattaacacaattagcagatgctggttctaatttcccacatttattagtttatggaccatcaggtgcaggtaaaaagactagaattatgtcaatgttacgtcgattatataatacaacatcaattgataatttaaaagttgatgttaaaacatttacaacagcatccaatcgtaaattagaattcaatgttatttcaagtccatgtcatattgaaattacaccaagtgatatgggtaataatgatagagttgttatccaagatttacttaaagaaattggacaaactgaagcacttgatttttcaggtttatttcatttagctaagaaaggtactgatgaaattacaaatgataatataccacaaaagaaatttaaagttgttataattaatgaaagtgaaaaattaagtagggatgcacaagctgcattaagaagaacaatggaaaaatttagtagtacaattagattaattttgatgtgtgatagtacatccaatattattgatccaattaaatcacgtacattaggtattagaattggattaccagataatgaatcaatgaaacaaatatttgaaaatatactaaataatgaaaatgatgcaaagaaaatatatccagaagattgggatgatagatgtattgtttatgatcatataattgaagaatgtgataataatttaagattaggtataatgatgttagaggcaatgtatatgaataatgattcaatttcaattactacacctgttataaaacctgattggatttcagttattgaaagtttaacaaaaggtataataaaggaacgttcagttgcaaaattaagtcaatgtagaactattttatatgaattacttgcacatgcaattcctggtaaattaatacttgaaagaatgacatttaattttattaaaatgattgatgattatagttcaataaagaaaagtgatgaagttaagactagtattgtcaatgcagcatcattatttgatgaaagattaacacttggtagtaaagatatattccatttagaaggttttgttacaagagttatggttattttagaaactgatatcagtagttattaatgatattattaacatataccaataatctatgtacagtaatttttagagcattatatataactaactaattaaacatataattataagaaaatctatttacgacctgtgaatttagcatattcatcagtttttgattttaataaattagcaaattttttagttggttcttccttgattttttcaagataattaattttttcagtttcttcaacgtgaccaaaaccggctcttattggagtatctttatcaataaattcccaaataccaggtaatttttcacaagctcttctaagagtatcctttgcagcatgacgatgcataccatcaacttcaaaggcaattttaccagttggaactcttgcagcccaatgatcaaatggacctttacccttacccatacgtgttgcattacctttaatacaaattgcaatatttgtacaaagtcttttccataaagtaccattatgctttttaacaaatctaacaaggacattatcagctgcatgtaattgagctgcagttattcttaaaccttcactcttaagacgcacaccataagtaccaaattgtaatgtattacccttagttgaaccaccagtacgaactgtgactctacccttttgctttttcattaattgtttatatcttggagctaattcatgaccaaatctctttgcagatggttgtgcaacttttttcaatgaagaaaaagctgtagatggtgaaaatattttcgatatagaactaaacatattggtccttgtatagtttagaaaatatagctaattttgtttcttcttcttattctcctcttatatttaacatgaaatttaacatgaatcgatttaaagattcatgttgagagatttgaaaatttatgaaattttaaatatttttatactgtgtacgggtgtacggttatttatggatcacgtgacacaatttttgactgtccggctgagccaatgttgaggtaatgcttattaaaactatctccctttaccagtagaaagagtttgaccattttatgtatgttttaagttttgagctatagataacagtttacaactgccagtgtattctttttgcacatccttaatattctataaagcactactttgcttgttagcttaaagtgttgagccacttgaaaaatgctgcgtcgataagactatcatgaaatttatcatctcataataacatgaatggatgcaattggatcagtttaactgaagaatagccagtttgatattttaagatatatccttagcttattactcagcttacagtccagcttgcggaaaatgtcttttacctgtgtaagtgtaaggaaatcatttattccaattggaaaatgtatttcaaatcgtgcattttcaacttcccatattcaacgacaatcacaaaaagattcactcaatgttttaggaacaacatatgaaagtgatgaatggacgaatgcaactccaagaattctctccttagttggtagagatttacataaaaatccaaatcatcctattggtattttacgttcattaattgaaaatagatttcaaggtttaggttatacaatgtatggtgatttaaaaccaaatgtttcagttaaggaaaatttcgatgttttaggtttccctgctgatcatgttggtcgttctaaaagtgatacttattatttaaataaagatcatttattacgtactcatacatctgctcatgaacatgaatgttttataagttgtcaaactcctggttattttatttgtggtgatgtttatagaagagatgaaatagatagaactcattatcctgttttccatcaaatggaaggtgcaagagtttggaaaagagatgattttaaaaatgaagaagaattattagctaaaattcaatcagacattgatgcaattccaaaaactgatttaattgttgaagatgttggttatgatccaatcgaaaatccaaaacaagattttatgacaacaaaagaagttgatttagtttctcaacatttaaaacgtacaattgaagttttagttgatgttgtctttaatgaagctaaaaaagcagctaaattagctggttcaactgaagaatatttaaatgaacctttaaaaattagatgggttgaagcttatttcccttggactgcaccttcttgggagattgaggtttggtggaaaggtgaatggttagaatgttgtggttgtggtaatgttagaaaattagttttagataattcaaatcttgataattcaattgcttgggcttttggtattggtttagatagaatcgcaatgttattatttggtattcctgatattagattattttggtcattagatgaacgattcctttcacaatttaaacaaaatcaaatctcaatttttaaaccttactctaaatatcctggttcagttagagatatatcattctggttaccacaaaatgatgatggtaaatttttaaaacttcatgaaaatgatttaatggaaatcgttcgtgaaaattcaggggatttggttgaaagtgttaaattagtcgatgagtttgttcatccaaaaactggtaaacattctcaaacttatcgtgtcaatttccaatcaatggatcgtaatataactaatgaagaagttaatgttatgaatgataaaactagagatgaacttgtcgctaaatttggtgttcaattgcgttaaatttcttatttgtatgctgttgtataatgtgtcatgttttaagtaatagatcttgtaaatattttaaaaaattataaaatcaaattagtttacctaattaggcatctcaatcctcaacatgaaattttgggaaagctgcatttttcaatcttagtaatcggggtttgcattattcatcaaaagctatatagtttgtttcttccaggttgtttctttagtagagaaagatatattggcgaatgacaggtcacgatataatcattatatacggttccgaaactggtactgcccaagattttgcatatacgttagcacatagatgtcgatatttaagtttgaatccattagtatgttcaatggattctcttgatcctaaattactgttagaagtttccacattattgttattatgttcaactacaggtcaaggtgaactaccaagacattctagaaaattttttaagttcttgatgagaaagaacttaccaagtaatttacttgaacatttacgtttctctacgtgtggttttggtgattcctcttatgtcatgtataatttagctgcaagaaaatttcacgcacgtttaaaacagctaggtgctttggaattatgtgagagagtcgaatgtgatgaacagtcatctgaaggtcaagaagcgttttatggtgtttgggaaaatttggtctttgaatcattgaagaataaatactctgataaaattattgaaatacctgaaaatgttgttctggatccaatccataaagttaatataagaaaggatttatttaaaagagatattagtgcagtgaaatcgattgatagatcaggttcgaatgcagacttaattactgttgatgttggtaaaattgatagaataacggatccagagcattttcaagaagttttgcacatcgtgctagataaaccaactaaatctttggactatagagttggtgatacattgtcattataccctgaaaatgactcacacgatgttgactctttcattaatttacaagaatggaatgacattgcagattatccattaaatctccaatgtcctgttcatatggaacccgaaggaggatgggtgaggaatctaacattgagatctttggttaaatatcatttagatattaccgcatgtcctcctagatcatttttcagtatggtatggcattttgcatcagatgatcgtgaaaaggaaaaattacaagagttaggtaagattgaagaatctgaacaactatataattatgttaatagaccacacagatcgattctagaagttatccaagagtttttctcattaaagattccagttgaacaaatacttgaagttataccattgatcaaacctagattatttagtatctgtaatcttccaactcctgacaaggttgaattgacagttgctgttgttgagtatagtaccattattcgtaagttgagaaagggtctatgtacaagctggttgaagagatgtataactggtgataaaatgattatatcaatcaattctaataacttgaaaattttagattcaaatatgatattggtaggtcctggaactggtatagctcctgttagggcaattattcaacataatgataaacttattagagaaaatggtaaaggtaatgaatatttattatttacaggacatagatatagaagcaaagattatctatttggtgacgaatggccgcaaatgaaaggtttgaaggtgatagatagtttttcaagagaagggggtggatatgttcaagacaccatctggaaaaataaggaaatagtagcagatatcttgaacaatggtggtggattgtatttatgtggaagttctggtaaaatgcctacacaaaccagaatcacgattgaggaaatattgaaagaatctaataattgggatgatcaaactgcaaaagatgttatgttgaaaatggaaaaggagagaagatatattcaagagacatggtagttagagaagtgttttgtttaaaaattatgtgtaacattattcttaaaaaaaaaacttattaattacattactttattagtgtatcagtgatctatttatatatttattgtacaaaggttactggatgctatcttgatgtttgaaattgatcccaatgatttattcatctgattcatcaagactgtgttcctcttcattctcttcttctgaatcttcttcgtcgtaatattcatcatcttcaggcccaggaacatcaatcacaagaatatttttctcctcagaattatagccttcttcttctgattcttcatcctcttcatcttctgagtcagaatcgttatgtttttgatttgggttacccatagcccaaacatcaacttctcctttaagtttctttctttcttccctttccttatcaatcatttctagaaaagctttttcagcatccaaaacactttgagaatctgtacattcagcatacatttctaataattccttattgatatccaaaaatgttggaccccaagaaaagttttctaataattctaaagcccaatcttgatgaccgacaatagctaaacatgcagcaactgcttcaacacagttcaatttcatcggacgtccatagttaactggattagcagccacaaaataaggtaataatctttcatatttaccaccaattttaccaaatggaacttcctctaatctagcccaggaacattcaacaacagcaacaccaaattgttcaacaatttctttatcatcaggacaaacgacacctttaccattgggagtgacaataataccttgaaatttttgtcctattcttaaacttttgatcaaacctaatctttcaagtttcttcccactacatctctttggatcacagtgatcgaaatcccacatagcaagttttgtagggaatttagtttgtcgtaaaactgaagagtattttgtctcttgtctaccctttccatgatgggtacgattatggtgaccatttgaagttttgttaccacgttttggttcgtctctttccttatttttacctttacccattattgtctttacgaaatgtcttgtatatatccagtggaaacaggttaatgtcaaagttaataaaagttgaatcaactgaaaaatattttttgaccttctcagttaatggggaaaatattcatgggataatcgagctcttacactaattttcccagtaaaatttttctacttcccatcaaaccgcatctccggttcctactaaagttttcggaacatgaattttctattattggatcaatatataaaaaaggctgggacataagtattattatattttggatttcttttttcatttttccaatttccagttaatggccaacgtggagatggcaattcaacactcagatatgagtccaatgctagatacgactaactcattgaagtttcagtcaagaaagcctaaaaaaatatctgcttggttatcgaatccttttataaactatattttcaacaatcaagatttcaaaagatcaggtccattaaaggaaatcataattcaactgtgtgagaatccttcccattatgcaatattggtaccatctacaatctttttaatgacccatgcagatgctcaaactaaaaaaccttattccgagatgtgcaaagatttagaatttatcctatcacatattgtacgactggatgtatctcgtgatcaaagaatacgaacgcataaagagtttacaacattgaataataaagttcttttaataaaagctgatagcattaaatcagtaagaaatttcaaatattcagtagatgttaccattttacgacaagaatttatacgaggatttgcaaattatattccccttggtacgtgttttcatctcattcacatatcagaaagcattttaacaaactatgaatatataggaatagcgcaagatctgttaacaacgatgaatgttatcaatggctctactaataactcattgtcacctacacatacaactaaatcgcatatacaatttgttgatttgatggataaatatgcagaattgaaagagctcgataagaaatttggaactttgtttgaagaatacaattttaaaaagtgcaaagcgataacggatcttgatcaatcatttagtgtgataatgaaaagaggatctgctatgtttaacacattacaggcagaaacttttacaaatctcttgaatgtatattccgaaaatgaactaacagaaatgatctataattaccttgaggagaacatatatccaaaattttgggctaaatttgtaaagttgtcacctcacgattatgatgaaaaactggtactagcatatgaaaacttgaaatggctcagtataactgaagttggattacctgataaagtggtcagtgatgtaccattacttatgaaatacacagaaagagttaaattagcaattgctgaatttaaaaaaattttaccggcaccaaatagtaaccagaaatgtctctgtttgattaatacaattgaaattctatctgctgggagtacaattgatgctgatactttgataactttattgatttttgttatttgcttatcaaaagttaataatctgaattgtattctaaattatatacaaaagtattcttatgccgaaacaaacatagaatcaggaatgttgggatatgcgatctcatccttagaagttgcaataaaatactttcatgatgactataatatggatggaataattgcaaaatctttgcagaatgaagttttatggagacttattgggtcagttagtagtgatttatcattaaagggtaacaaagaggatgacgagaaaacttttgaacaaattgaaaagttattgaagcctttaaatgaaccaaataatatacccctggatagttttgttaaatctagatctttaaatggtgaatcatgcattatgtttgcgttgaaacaacataatgaagaattgatgaaggttttgcttcaatttgataatatttttacattagatgatattttagaagatcaagatattgaaggatcaaatttattgtctgtggcacttgatatggaacatcccattgcagatactctagcaatgatcatcaaagaagcaactgatggtgaaattatgcaatatatcaataaagcagatatcaatgaaagaacagttggacatttcatgtgcaattctttccatttgattaaatattttggaatgtttattaactgggctaaaaaagatacttttggaaatacaccatttatgatatatacccgtcgttacgatcatcctaattatttagagatgatgaagtcaacaatcaaaacagttgaaaaatggtatcagagaaacaatagagttttcagttacacggaacatgtcgataataaaggtaattcaattatgcatgctatcagagatcctactattttagaattatttttgaaaacgtttgaattgctagaattaaattgtttgaatgatgctaatcaaagtgcaatcacattagctattagatacaatagaatcgaaaatgttgagatattaatgaaagatgaaagaacttgtatgagtatagttgatcctgtatcgttcatgagtgctctggattatgttaaactagaacgttgggatgaatgtgttaatagagaaattgccaaaactttggaagttcaatttattgaaactgagtatggtgaaactctgaatattgcatgtgtgagggccagatttgaacctgcgcatggattatgttgttattttagggttgtcaataatgaaggatgtagtgatattatattggtaccatttgaatgtgtggtgaaagtactaaagttattaaaacaagaaaattcatgtataccatttgatttttccaaacctgatttatggttcccaaggcattcgtctgttagtatgaaaggtaatataagttcatcaaataaaatgaaaatcaattcattgattaacaatttaaacttaatgattcaagctctgatgaaaaatggtacattaaaatacacacattcacttcaaaattatttacttgttccacaaactccctttgaattagaagttaaaacaattgatgaaaaggaagttttgaaaaatatctatcaggagaatttcagccatagaaaagaaatactttttagtcagtcgaagttcaagtcaactattattagatgtgaagatataattgcatttgatgcattcttagattatactattgaagaactggataagtttgggaaatgctattccaaattttatagaacattaacattgagtgatgtggaagctaaagatttagataaacttcgtactgatataccatggatagttacagatgctttgaaatttagagaatgtagggtagaagattcttgtgatatatttcttgataaattgagacttttgtttgcaacagtgcaagaattgataaaatcatcaagagaattgaaaattactaaagttagaagatggaagaaattaagagttgatttaaaaacactaagaagtgaacttgatagagttgcaggtggtggtgttgatggatcacagtcaccaactgcctataatggacccgctgatgctagcattaaaaataatagaaatcatatattgtccaaagtattcaaacaaattgatattgtcactggtgaatgtcatgaaaatgatgatataaatgaatttagaaaagatattattaaggtactcattaaaggagagtatgatggccagaatgaaaattttggtgtagaaagtttagacatcaaagatgaggcagtaagtaaggataatgaagaaaaatcattgactgagatgattaacttagaagattttggaatcagcacatggtttgttgaaaaaagaagaatagcatatgttaaaagattattagaaacgttcttaaagtacagaattgaaatttttgaacttgatattgaattaagaaagaaatatgaaagtttagcaacatttgtaagtaaattttatcaatttagaattgatttgttcaaaaatgcatataaatgttatgcaatgggtaaaattggggaattaaaacgtgaagtacaagcctgggaattaggtttacgtgaacataaattaaaaggaatgtcaaaaatttaataaaagattatttatttcatagatattatttatatagtaatttatagagaaagaaaaaaaggaagaaaagtaattataaattttaaagttaatttcctgaattgttgttaccacccataaagttttttgccatattttgtaacattggattacttgctaaaccatctaaattatctgcatcgatacccattgagctagccatttgtttaacttgaggattattcattaaattacttaaagcatttggatcttgcatcatttgagctgcagcttgcataatttgaggattattcattaaacctgataaaccacctaaaccaccagattcgccaccacccatcatgttagcaaatgcagagaaatcaggtaaaccagttgaagctgaacttgcagcaccatcagcacctacaccagcagttgcagcaacaggagttggtaaatcggaaccatcagattcaccattcattgctttatttaaagaattcattaaattatcaccaactttcttctttgcagtttcataacctctcttcattgcatcagttggatttgaaccttcaacttgtaaacctttttcataagcttttaaagcttcttcagaattacccaatgcataattagcaagacctaatcttgaccaacctttagcataagttggttcagcttcagttgctctctttgcatcttctaatgcaagatcatgtttacgagcagatgaataagcagcagctctatttgataaataaacggcattagttggaattaattcaattgctgcagtatatttagcaatagcagtatcataatctttacctgccattgctttattaccttcaagttttaaagcttcagccttttcctttgttgcttcatcactttgatcaatatgtacaggaacttcattttctgatttagctggagtagaatctgaatttgaaacagttgataagagttgatctaatgatttattatcataatttgccttaactgcattaatctttgatgaatcaagtttataagattcagttataccttcaatggcaaattcaattgaatctctgttatcttctggaatatcaccattttgaatagctttttgtaaaaagtcaacaataagggatgcagtatcttgtttagaagtcattgtatgtttagtaaagggtatctaaaacgtgtagttacttctataaaactctatacttatatacgaccacccaccagtgaatattttaaagtgccatcgtgtcaccaccaaagtgctcaaagaaatttcatgcagagtgcgcgaaaccattttttttttctttttgcagttggtcttctcgaaggttctgacttatttattatagggagttggctcagctggttttaataaaattcttgtcttatcttatcttatacatagtttgttcttttaatacagatattgtggtaagtatagactctgtacagagagtcattggattgcaaaaggttatgagtcaaattttgacattatcttcacatggaagtaccgcaaagtcggtctgctcccattggatttgtgttacagtcatgaataagaagcaaaaagattgctatcactaaagcattgactaagtggatatttagtattagggaaatattcttcacactctaagattatcttacaattaattttattaagatttttgatatgaaatacttttaatattttacaagtagctctccattgtttaacagtgacattaccatctttaaaatcatcaccaattctgacttctttactagcagcaatcaagttaatgttgataaacctactggaccttggaatacacaccaaagaaattgtctacttagtagattctactccaaactataaagctctgtatatcagatatgtgtttgatattgctaacattattgtttttacttattttataattctaattaattaaatatttttctatgaacgttatcttgatgtaataactatacgtttatagcattttggagcattccaataactaataaatatgcctgtccttaataatttttaaaaatttgaaacatcttgcataaaaaatattcctttaacttctaaaatattttagatttttaaattgtagcaattaacataatatatcaatcaatacaagcactagacacatttttgaaataaaatacccaacttaaagcacattaccaaaggactaacggtcaatttcaaataaaacacaacaatttctatgtcatatagaaatagactaagcgaaagataagataatgaaaattcaacatgaattcaaagaacaagcttctttcaatttttctgttctttttcatcatatctctagccatcatttgactgatataccaccagataaaacatggatttttattcatcattaaattcaagtcaattagatgttaaaaaaccaacaatttttgaaattgcatcatgttcacaacttgattcattaataactccatctataagatttttacttgcacattatacacatcaatatcctagagttttaatccgtattttaaataattttgatgaattaaatttattaggtagaggaattgttgaatataattatttaaagacttggaattctacatttattgagaaattttatggtattaaacgttgttcatctaaaccaataattccatcatcatcagattttgatggagattcattaaaatttaatgaaatttcaacactttcaagagctcaaatattatcatcattgttagatactgttggtttaccatatttggatacaaaattacaactatatcatgaaaaacttgtcccgatatatttgatgaaccaaaatactgttaacataccacaagaggaacaatcaaattcagcaaaagatgctaaatctacattaccagttaagattctatcaatattatgcaaattgaaaactttaatacgaaatttattttttaaatattatccgattgctaaaatgtcattaaagttgattagtttattcatctacataatgtatttatcaaacaaaacatcatcagcatcaatcattcaatatttatccaaaatatcatattcacgtttaacaaatgctgatcatcaaagagttgaatcaataataacaccaaagaaaataattaaatctgaatcaaatgttccacaaacatttacatcaatagttttatcaaatattaaatcattaataaatccacttgaaaaaatagcttggtcaacaactgatacaattttaccagcatcaatatttcttcttagatttttagaatggtataatgctaatagaaatcccgatgatgataatgattcattaaagaaatttacaataccaccagcacctaaaattgcaaaatctaaatttgatgaagaatttgatgaagagaataaacatcatgattcatcaatttgtagaatttgtaatcaaaagttgcataatccaggtgctattgaaacaggttatgttttctgttataaatgtatttatgaatatttaagagatcaatctaaggaagaaggaggtgtttgtccagttaccgggaggaaattattaggttgttcatggagtgaaattaggaatgaatggaatgttactaatttaaggaaagttattctttgaaataagatgggaaattatttatattaagtattatatatatatatatattaatgcaagaatgtgtgtttatataataaaagtgtagaactgaaaaatttataagaattaccataaaaaaaaagcgtacaaaaccgtaaaatatttgtgaaatgattgattgaagttgtctttaacttttatcaatcagtttcatcattgacactatcatcatcatcatcatcatcattacttgcccattcaacatataaattctcaacagagacacgagattttttcaatagtaaaggatcaaatggaaaaaatgcaatcaaatctaaaaattcttgagttgcacgcattgaagattgtgtagtaccagctgatgacattgaacttgcagttgaagttctatcattggtattttcatcgattgaactaccattattattattattattattattattattattattaatatcattattattagtattatttgaagatgtgttgttaactctaccaactctttctcttctgattctttcaataacactccaagtataacaaataccttcagattgagcaacacgactgaaaattaatacaacagtttcattacaccatcttaaaggatcatattttgatattataactctagtgaaaaatttatctaatgaagcaacccaaccagttttattatcaatttcattattattagtattatttaaatttaaatttgatttttccttatttaatgaatttttacggaaacatattatgtacattaaagcttgaattaaactgtaaaataatgcatgcttagcaggattaaaattttttctttcattattcccactattcgatcttgaagataatgaattggtattattattgttattattttcattattttcatcatcatcgtcatcatcatcactatgttcttccatataagctgtacaataatctactaaaaatgtaacaactgaagcaatttgcatatcagataccattttagcacgagcaacaaaacctgcaatgtattgcataccaataactttattatttaaatttatatttattctatcagataaatttcttggagaatctgaatttatattacctgtattgaaaacaatttcaaataaagcaactaagaaagcatcaattaattcaggttgttgttgagaagcataaaaaataatatattgagttgcctttgtaccatgagttggtataacaatattacgaaaagaatttattaatgcattaaagattggtatcccatgacccgattccaatgattcaactgataattttggttttaaatattctaaaatatatgataatagattatcaattttagctgataattctgataatgattcaagttcgattgtataatctgcttcattatctaacatttcatcatcaaactgttcatcatctgaatgtatagtgttgtctacaatgttctttttatcattatcttcttctttttcttcatcatccaaacctgcaaattttacttgttttattactttaacctttttaattttattgactttttcagcatcttcattatctgaatctattatgtgatcttcaactgtgtttattggattttcatcattatcatcatcatcatcatccatatcttgatcatcttcgtcatcgctttggctatcaacatcgctttgatcgtgatcatctatatcactcagatcatcttcaccatcctcatcatcgtcatcatcttcctcttctatacctaaaacttccgataaatcatcatcatcaatttcatcaatttgattttggaattctacatctaatttaacaaaattttcaataattaaattccatatatgatttgttaaaacattgtaataatctgaaacatataaaatattttgaacatagaaaacatgatcttcctttggagaatttttattaggataatgagatttcagtaattttggtaaataatttgaagaagttggagctaaagaaattaatcttttcaaagtatcatgatgagaggataaagttttcggatctgatttattaaaatctaatatgattttagttgcaacttgattccaccaagaaggtattgttgaaacaagtattactaaaaaagttgcataatgtttattaaaatgagaatgttgacttgaatgatagatccaatttaattttaagattgaatttataagtggtaaagcatttcttgaatcaaaacgagcaatttcagaagttaattgagatataagtaatgataaattttgtgaattaattgctttaatattatttgaaggtaatgaaattgtatttgcaagtgcctctattggtgaatcatcgtaaattgaactatttgaagaatttgattttgaatcattattttgatctaatgaagcaatagcagatttagctaattgtatgatcatctttgaactaaaagatgaattagaagatgatgaattgggagaagatagtttaattctctttgaatttgaattagaattagaatctccccgttcatcatcctgcgatctcttttccgcaggagcagtggaaagtacggtcatcatctacaatacaatacggacagggcgccaaataggggacagaccaactgagataaaaagggatatacctctagagattaaaaagatcaatagatgtcattcagataaagaatattactactataactgtggtttcctttaacttagagagtgaaaaatttaaaatttttttttaattttttaattttttaatttttttaatttttttattttccatcggaattttagcattttatcctaaatttgcttaattttccgagagagcatttggtcctgtttctttactattgtcgataatttacaaattacagtgatgatggttttcatttattaatctggaatatattatcgttaattgattatatcaattagtgtattagatataactattataaaatcatatatatactgtcacaatgaatactatatcgccaccaaacaataccatatcaactacatcactagtcaatgatcaacgcacggcccttaacgttatacgagaattccttaaatctaaaacttcctttgatgtcttaccagtctcttatcgtttgatagtcttagatacttcattattagttaaaagagctttaaatgttttacttcaaaattcaattgtctctgctccactttggaattcaaaaatttctaaatttgcaggtcttttaactgcttcagattttcttaatataattcattatgctgcaactaatcctgatcaatcacttaatttatcagaaactttaacattagatggattagctaatattggttcaatgtcaggttcatctgctttggatacttgttcaattcatccttttagatcactttatgatgcttgtcttgaaatgattaaatcatctgctagaagaatacctttaattgatagagatgaagaaactcaaagagaaatagtcgtttcagttctaactcaatatcgtatcttaaaattcgttagtatgaattgtcgtgaaactagatatcttttacaacctttaagtgaactaaatattggcacaaataataatttatgtcatgcaagattaaatacgtcaattggtgaagtaattaatctattgattcaatatcatataagttcagtacctatattagatgatgatgataaattaataaatgtttatgaagctgtggatttattatcattagttaaaggtggtgtatacgcagatttatcattaactgttggtgaagctttattgaaaagaagtgatgattttgaaggggtttatacttgtacattatcagattcattatttgttgtacttgaaacaataagaaaaagtagattacatagacttttcgttcttgataatgagggtaaattattaggtgttatgacattgggtgatattctcaaatatatcctatgtagtgatcaaccataatttctctctttactaatgtataatgtataatgtgtagtatatataccaactgttcatcctatcaacatgaattggccaatttctctctccagcggtcgaactataaattacccaatatggcaatgataagcgatatttttttttcaaccttaatagtcttaacaccagggaatggattactaatctttttatctttctgaatttttgtcactttttattctttctttcattacgtctgccccgctgataatcaattgaactagaagaattatttcagttcatataagacacatttaaatacctaaaaagctttcttaaaaagaagcttattaattagaaatcatcaattggaatcatcctcatttttaagatatcaaaaaaatgtcatcacttggttcatttacatcaaccttcaacaactcaaagaaaagcgctcaagttacattaagaggaacaattgttggtcttctaatagggactttgattttattatctaatttccaatttggtttacaaacaggttgggtttcaatgatgtccttacctgctgctttattagcgtattcattatttaaaattttcaataatttcatacctatgaaaactccattcacaccacaagaaaatgtttatgtacagagtgtggcagttgcagttgcaacaggtccattagcttatggatttattggtattattccagctattgaaaaattgttaactccggaagaagctggtattcttcaaaatgatttttcaagtttaaataatacatttaatgaattagaggaagttgtatttcaaccttttaaaccttggtggaaattaattatttggggtacaggattagctttctttggtgttttctttgcaataccacttagagaagaatttattattagacaaaatttaaagtttccaagtggtagtgcaactgcaactctgattagcgtgtttcatgattttcctttgagattaattggaagaccttctaccaaggatactttgattaataataatactaataacattgataatggaaatgataccactaaatcaagtattcactcactttcaatagaagaaagagaaattatacgtttaggaatggatgttataaccaaccctaattcaattaatgacaataacagtgataatgattcactcctacatcaatcaacaactagatcaatttctgaagaattcttagatatggaatatatgggtaaagaatcatattcaagagatatgatattattatcatttacagcattaatttcatcaatttatacattgactacatattttataccacaaattagaacaattccaatatttgggaattatttatcaaatgaatatttaataaattttacaccatcacccgcttatattggtcaaggtattataatgggatttcaaacaacttgtggtatgattattggtatgattatcggttggtttatattatcaccaattgctaaagtgaaaggttgggcacctggtgaaactggtgattggaaagatggttcagaaggttggattatgtggattagtttatcaataatgattgcagattcaattgtttcattaggtttaataacttataactcattgaattcaattatgaaatcatcaaactcttccaatttaaataaaagttctggtgaatcttcaaatcttttacaaaatgaagcaactttagatgataatcactcttattcaagtacagaaaataatgttgaaaataataatgataacaatactgataatgttcaagatatcactgattttactaatgatgaaaacattaatgatttgaaatatggaaatgatgaaaatgaagagtcaatccctgcttcaatacccactatcggattaatgttatgttgtccattattaattatttcaatgaaaattatatttggatccattatacctccgtggatattattattaactataccagtttcattagttttatcattaattggtgttaaatcattaggtgaaactgatcttaatccagtttcaggtatcggtaaattatcacaattattaactgcattagttataccatcatcaagacctggagcagttttaattaatttagttgttggtgcattatctgaggcaacagctcaacaagcaggtgatttaatgcaagatttgaaaactggatttttattacatggatcacctcaagcacaattcatgggacaaatatttggtagtatttgggggattttaattgcagctccaatgtatagatggtatgataaaatttatcaaattcctggtccaatttataaaataccaacagctgttatttggattgattgtgctagattagttaatggtcatcaattacctaaaaatgttgataaatttgtcttattatttggtattatattcttcatcctttcattaatacgtggaattaataaagatagaacaaataaatatactaaatatactaatttaattccaagtggtgttgctgttggtataggtatttataatacaccttcatttacattagctagatttgttggtggtattataagtttaatttggatgaataaaataaagaataaacacgtaaataaagatgatagtcatgtcagtttgattatctttagtagtggattggttttaggtgaaggtttattcagtgttgttaatatgattttagcaagttgtaatgttccacatctataattatgtctctacggtttttttatactattatattagttaacttattctactattttctcttgtctctcatttagttatctcgtgaaatttatttgagatccatgaatggaatgtaaggttctataatacattaacttgaaataaaagcagtaaaagcataaaatttaaaaaagaaaaagtgaaatgaaagtaatttttcttttcttgttaaagcagcaaagcagagaaaataggataaaagtagttcaaaataagatagaaaaagatataataagtagataggtgaaaattatcaaagatactaatatagaaaaagaaagataaataattctaaaaagatttatgacaaagataagggtaaactccaaaaattataataaatgccactttttttttcagaaaaaagataaaaaagagaaaaacaattgtcaattcaatttgtgttttataatcttgctttctttttgattatcaattatcaatatcttgaaatttaattaatcccattagcatccctttgctttctttgtttttcattttcaattttattattgatcaaaacaattgcattttgaatgccataaatattaccaattaaagttaattttctttctggtgcaccaggaatttcatcattaactttaacataacaaccagtattttgtctgatatcttttaaatttttaccaccacgaccaatcactaaaccgatatgagtttgtgaaacatataattcttgattgactttaccatcagcagttgtaattgtttcaccaggtctagaattagtatttgcagttggtgaaattaaatttgtttgattattcatcatacccatattcataccattgtttggtaccccattgaattgcatttgaggattcataattttcatttgatttggattatacattactggcatcatcatattattttgaccttgattattataaccaaatctttgattattagccatattattttgattcattgataatgcaggtactgaaggttgattatgatttgcaggattataatatattgattttgtaatttgttgtttatgttcaataacagtttgtgcaacataataagttgcaatatgaattgcatctgcaacaccactaatatttaaaattctatcagttgaagctggtaaaatttgatcatttgcctttaatgaagcagcagaattttcttcaatttctctaaatctagcaccttttttaccaataatatatcccataattgtatgagggaataataaacgtaaattataaggttttgaatcaatatttgaagattgtccaaaaggttcattattaatagttctaacaatcagaccaaaagcttttgcaacatattcggcggatccacgtacactgataactctttcagggacaccttttaaattttcactaacatttacacgagcatttgattcttccttgattttagaaattgattcaccacctttaccaactatattagcagtatcagaaactgatgcaagcatacggaaatgaacatacgttggatcatcattttgtacaactttatgtgaagagattggtccatattcattggcagtattattagcaaagtcatccttagatggaattgaacttggtgttacattattgttgttattattagtattattatgattgacattttcgtcattattatcactggtatcattactattattattattattgtcatcatcatccccttgattattattgatatttgtattatttgagacatcattatcttgatttggtgatcgatctttcataacttgatcattactatcagtattatcattattagttaaagatactgaagttttctccttgtcatcttgaatatccttctgttctacagcctctgcatctaatgccacccttttaggaacatgtgtagtattttttgattcctcggattcttcgttctttcttttcaacatgatataacaatattctatgtgttatccaatggtactgtacaagatggactcaattgagagaagactgtaataaatacaatgtatttcaaagcaacaaattgcagttatccaactcttccaaagttgtctttccacttacaatgcttttttctactgtttttttcaccagagccctcgcgagagagcaataacgggttttagaaatttttactatgtgatattggtgaggaagcttttttttcgtatttcctctgatggagtcagtggcgtacatcccaacacgcttttatctttatttgatcacacgtcttggtgaacagcgatggactcggcaaagatacaggacgttgctgatgtgcagcagaatgcacacaaaaagtttgaaactggtacggtttcagataagggagataatgaggtttcaaaaattgatggaaatggcgatgaagatgaagatgatgatgggtataatgaggatgaagatgaagattatgagggtgataaaattgagaatggtatagaagtggataatggtgaaaagaaaagtgaagataatgaagaggaagaagatgatgaagagtatattgtcgaagaagatcggaaagaactagctaaatatagtactattgaatctagtgaaggtggtttaattaaaacaagaaaacagagacaacaggaagaggaagaagctaagaagagaaagaaatatctgtcatctaagaataatggtgattcaagtaaatccagtttgaatattgattctatatgggcagaattaaataaaccatcatcatcaccatcaactacaactgctacaccaaatacaacatcatcaccatctaattctatatctcctataaatgatacatcaaaaaccactaatgaaccagaaaagattaaaattaaaagttcgtatgaatttgcaggtaagacaataacagaggagaaattagttgatgttaattctgaagaagctaaagcttatttgaattcttctaaacttacacccaagttagaatcatcagcttcagaaaatggaaaagaatcaacaattaaacccaaaaccccacttttgaaaaggagaagaaaaagagagagtttattagatgcagttatttcaaattcttctaaaacaaaattatcaactttagagaaatcaagattagattgggcaacctatgttgataaaaataaaattagtgatgaattaaaatataccaataaagatggttatttagagaaacaagattttcttaatagagttgattctcgtagagataatatttataaagatgcaaagacaaagacatcaaaaaattaaaatattatttgtcaaagacattcaatgattgatacctgtatattatttgtaattacgatacttctatgttttaatattattatgaattattataaattggtattaaataccatctacagttatatgtacatgtaattctattattgtttattaattctctttgaattcaaccaattgattaaatcaatgaaaagtgttgaacttattttattgtttttactaattgcccatttaaccatttcagtttgataaacatttgttattttagtcaaataatcttcatatttttcattatcatcaattttattcaaaattgatctaataatataaattgatacttgactacatgcattattcaatgcattgaattttgattttgatgcacgttctaatacttgccttataagatcaattaaatgatcaatttcaatttcttcgtcagtttcttcatcatcattttcaccaatactaaatggatgtttacaaatctttttaattaatttatgtgccttttcaccaactttaatatctaatgttaaattcattaaatcaagatttgttaatgcaattgaaataacttcaaaatttgttgaatttatattaacataaatttctaataaatctaaaattctcaatttacagagtgacattaaatctcttgcttcttttgcttcaagtttacgttcattaccatttttagatgatgattttaattcatttaatgaattttgacgttgttggaaaattgctgataattgattatcaattgccatcatttgttcatctgacattgattcaactgaggagtctgattctataccttcatcgtcatcatgatcatcatcatgatcatcatcgtcatcttcatcatcatcggaactggcatcaacatttttattagtatcatcagcagatgattctgcaacattcaaagctttcgcaagtgcagaagttgcagatttttcaacttcttcaattttagaattttcatcagattcttcatcagattcttcaccatcattatcttcctcttcttcctcctcctcctcctcatcatcatcatcttcttcttcactatcttcagataattttttctcatcatcctcttcatcaccttcttcatcataaccatcaacttcttgattaaataattcttccataccttttttattttcctttgttaataaaacatcaaataatctatccaattgttcttgtttaatttcatgaacaatacattcccaaatattattaccgattctctttttgagtgaagatttttgagttaaataacttaataataaatcaactaaagtatttaaaacattatcatcactttcatcactttctgaattttcaatatcttcatacatattaattaaatctgataaaattgagaaagattcactttcacctgaatataattctaataatgctatactaaataacattaccaaacatttatttaaattaattgacttacattcattattttgaactgaattattaatttttttccaaattttaagagaatttgatttaatttcaattaattcactattttctgaatccaatttatttaataattcatcatcattataagtattgagtttagtgacaatcatacctgaccaatcaattcgagttttacaaatatccattaaatcagacaaaattgattgtaatctttcatttgataatttaataattgactcattatatacattagatgaatctttgataaagattatatttgttaaatattctaaaattgatttaattgatgaaactagtggtaagatgagggttttatcatttgaattaataattgaattaataaatcttttattacctctgattaaatttaataaagaatctaaaataaatgtttgaatatcattcaatgaattatttgaagattttaattcatcagatgcatcgttaattaaccaatttgtaattttttcaaattcttcaattttatcattaattgtatccatatcaactttatcaataccattatttaaatttgataatgaagattttataattttagatttacttaatttatcaaataataaacattgtctagttaatgcttttataagatataatctatttaaaggtttcaattcaattgattttataattgattgcaatattttaattgataaagtatgtaacattctatcatttttagataaatgatttataaagcaacgagttaaattttctgagaatataattaaataaaattgtggaataaatgaaggtaatttaattataagttctaatatttgaagacctgtatgtttacgttctgaacttgaagaatttgagaaaaaagttgaatcaaaagttggccaaaatgttgataatgttagttgattgttgttattgttgttattgtttttactctttttagatgaatttttctgtttctttgaaatgtgagtagtttcatcattaagggataattcattttcaattaattcatttaatagtggtacccaaacataatgaagttgagcagtccaagaacctttttgaattttattacctttattgttgttttcattttcatcatcatttgagttattatctataattctatcttgtaaagcatcttttaataaaggtaaattaccctttgttaaaggatcatcatttttccaacgaataattgaagaatcaatattagccttttcagtcattaattttcttaaatttgaaggtatattaatatataataaaacagaatccattgaaattaataaattatttgaagctaatttagagataatcaatgggattattaaatcatttgatattaaattataagattgaataaatttaataattgtaacaattgcaatttctctaatccaagattttgctagggcaatttcaaataattgattgattattgatatatgtaaatcaatatcatctttccccaataaatttgaattaattaaagattgtaaaccaaataatttaccaaataaataacaacgtaaatttttacccttttgtttatttttaatagaagaatcaagagaagaatttaaagattgtaaaaattgtgaagcattataaggataaatttcattatttgataaaagtgataataattcagttaaacacattgagaaaccaagtctagcagaatcattatttgaagctaaacctgaaattaatcttttcaaagcatatgaataatcatcaattgaattagcagatgataattcactaattaaagcggaagcagcagaaattctttcatttggtaaattagaagccaaacgatagtaatgatctttagaaactggcatttgcccaaaggataagttattaaaatctatcgatatatcaaaactttaaaaaactgattttaattttacaataaaatttcataataataaaaatccttcaattttcatgcatgtaaccaaataattcaaaatttcttctttctacagattacgtaataaataaattaaaaactctccattacgtaatgaaaataaaaggacgacgcgactatttaaccaaccaatggttaagcagcattcttaaaggttcattttctcattcgctccactaacaataattaaaatttcagttgtaaaccttcaataccatgtaattgtatacctacaggattgatcctaaaatcctttaatttgacacacacttcatatagattaatcatgtctgcttggaaaaaggccggtattacgtatgtatcctattatactttactctctctttgaaaacttatactaacatcaatcacttcaattattacagcgttaacaaatattttactgtctctgcaaagactgttactaaagctttaaaacctgaatatcaagcaaaagcaagtagaagattcattactgaagttaaagctcaaacttataaagatggtgaacttgtcaaaaatgttgacctttcaactggtaaagaactttctatttaatttatgttagtataattataatttataattataattgattatttatcataatattatactatatcatattacattattgtataaaacttatgcagattatttattaaaactaaagatacgtatttattctaatatcctaactattactattacttctagtaagaatacactcattatagactctccgagaccggattttcatattaaatcgcgagaatggaagtactcatagtttacatgaaatttcaacaaattatttctatataaggtatatacctttatagtttcctttaacaatgcaatcattacgtcgattggcttataatggatcgataggagggaaattattctctcctaatataatatcatttaataaatttaataaatataatggaattaacttatctaataaagttaataataataataataataataataataataataataataataataatatcaatactaactattacatcaatcattcaagaaaatttcatacaatttcatataaatttcaacaaaataaagaaatttcatcatcatcatcatcatcattatcaaataaagaatctcaaatacccaaatctttaaatattttaaatgatgttaataaacttgaaaaatctaccaataaagataagaaaaaaccttcttggaaagaacgatggttagatatttcatcaaatgattcagatactgcaacttttactgaagtttggagattaattaaattagctagaaaagatttaccacttttctgctttgcaatgttattattaactttatcagctgcaattgttatgtcattacctaaaattactggattaattttagattcaactaaaaattttacaaatttagatgatattagaatttatgattatactttagatactttcctttatattatgggtggtttattattattatcaacttttgcaacttttactagaattattttaatgagaattattggtgaaaatttagtttcacgtttacgttcaaattttatgaaaaatatttataaacaagatatgtctttttatgataaaaataaagttggtgatttaatttcaagattaagttcagatgcttatgttgttacaaaatcaattactcaaaatgcttctgatggtataaaacattcacttattttaggttcatctttaacaatgatgtttatattatcaactaaattatcacttataatgttagcatttgcacctccacttttatttttttcttatctttatggtttgaaaattagatctctttcaagacaattacaagaagcaacaggttctttaactaaagttagtgaacaacaattaaattcaattagaacaattcaatcatttaccgctgaagttaaagaattacatcgttataattcaaatattagaaatgtttggaaaatttcttttaaagatgccgttacaaatgcaacttttttcggttcaactggcattttaggtaatgttacatttcttttaactttaggtttaggtacaagatttgttttaaatggttcaatgactgtcggtgatttaactgcttatttaatttatactgaatattgtggtagtgcaacttttggtatttcaaatttttatactgaattatttaaaggtgcaggtgctgcaagtagattatttgaaatgttagatataaaaccaaaaattgatccaattcatggtaaaaaattaattaataaacaaaataatttcaataatgataataataataacaatatctgtaaaggtcatataagatttgaaaatgttaaattttcttatccaactagacctgataatgaaatttttaaaaatttatcatttgatatacctgcaggttcaaatgtttgtattgttggaccatcaggtagaggtaaatcaacaattgcatcattattattaagattttataaaccaattgatggtaaaattttaattgatggagaaaatttagaaaattattcagttcattcaattagacaaacatttggatttgttcaacaagaacctgttttaattgaaggtacaattgatgaaaatattagatatggtttaccactttcattaagtaaaaaaattaaacattcagatattgaatgggcagctcaaaaggcaaattgtgattttatttatacattaccagaaaaatttaatacaaatattggtccaagaggttcattattatcaggtggtcaaagacaaaaaattgcattagcaagatgtttaattaaggaaccaagagttttaattttagatgaagcaacaagtgcattagatggtaaaagtgaatctgcaattaatcaaactttagagagattaatgaaagttggtaatatgacaacaattagtattgctcatagattaagtacaattgaaagatgtgaagatattttagttttaggttatgatggtacaattgttgaaaagggtaaatttacagatttatgggaaaataaaaatagtagattatggaaattacttaatacaacaccatctcaaaaggatgaagaacaatctgagaatgataataatgaaaaagaagaagtaaaagaagaaacaaaggagacaaacaaagatgatgaaaaaatctcacagacagaagctgatgatgtagtggaacaaaaacctgaaactaatacaagtccaccatctaaaactcgtgtttctgtttaagttaaaagtagagaaagtgtaaaatattttaaaataacattcaataaatttttattagtaatatattccatttaagtatataaaacctgtagatagaatggatatagagaataaaaagaagaaaagaagaagtaatatttaataaatttgaaaactatagaagcttcttgaaacttttttttccaaatcttgaaatttttattttttcatgaaatttgtcttttttttgccatccatcgttatcaaagttccgttgatgttaccaatatacacttcttctttttgtttcctttgaataacaagtatgtctaccacacaagagagaagaccacatcgaggagtcaacttaaacgttacactgacatgtccggaatgtaaagtgttccctcccgatttgatcgaaagacatagtgaaggggatattgtctgtgctctatgtggtttagtactatgttcaagaattattgataatagatctgaatggagaacttttaataatgatgatcaaaaaggtgatgatccatcacgtgtgggtgaagcaactaattcaattttagatggtgatcaattaaatactgttattgcagctggtattgatgcaacaaagacagctcgtgaattaaatagaactcaatcaaaatcttttgcagataaaaaatctcatagtttacaatctgcatttgctagaataacttcaatgtgtgatggttatcaattaccaaaagttgttcaagatggtgcaaaggaagtttataaattagtttatgatgatccttcattaaagggtaaatcacaggagagtataatggcaggtgcaatttttttaggttgtagaaaggcaagtgttccacgttcatttaaagaaatttgggctttaactaatgttccacgtaaagatattggacgtgttttcaaatcaattaatttaattattcaaagaaagaatgaagaacaaggtggtttaattacttatcaaaatgattcaattaatacaagacatacaaatccagaagatttagttggtagattttgttcacatcttggtttatcaccacaagttgcatcatcagctcaaatcattgcgaaatatttaaaagatgttggagtacttgaaggtcgttcaccaacaacaattgcagcaactgtaatttattttacttcattaatatttgatcaaaaattatctttaactaagattagtgaaaagacaggtgtctcagaaggtactattaaatcatcatttaagttaatggtttctgaaaaaactaaattagttgatccttcatggattgaatcaggtaagattgatttatcaaaacttgaatgaatgaacaaattgacagtacaaactatttattagtttattctcctataatatactactctactacacccttactctgtgttagcttctttcattccaaaaattaaattaaattaaattaaattaaaaaaaaacttttgtgactttataataactataattaataaaaaccaaaaaactttcagaaactactccgataacagatttacatattaacagaaaaaaaagtaaaaaacaggaacaccctataaataaagggagtaatgatacatactgatatatacatacatagatatactatctatatacactgtatagaactctaacacagacccatacaatacaatacaactcaccaacctacaggcagaacagagcaggtagcccacgtataaaaaggcaaaaaatatttatttgacgctcactccacagctcagttttttgaccagtgccattactaaccatttctattcctatttctatttccatttcctgttttcttttccttttttgtctttccttttctttattttattactaatcacctcttttctttgattaataaactatatttctgtattactgcatataagataattaataaagtagattagaactactactactaatttattatcatataatatcgtatcataaaagctcatcatatcatttatcattttattccataatattatcatttaatttataccccattacattatgtccgccgcagttattttagctaaagaattaaaggaactttctaaaaatccaacttatcatataactcttcaagatgatagtatatttagttggaaactgggaatttatattataaatcctgaatcaccttggaatcatgcatatttaacagctaatattgaatttaagaaaaattatccatttgctccaccttcatttacattctctcctccaattttccatgcaaatgtttataatgatggtaaagtttgtatatcgattttacatgaaagtgtaacaactccaatgtcaggtgaacctgataatgaaacttggtcacctgctcaatgtgttgaaagtgttattataagtattatatcaattttagatgatccaaatatttactcacctgctaatactgatgcaagtaatatgtggagagatagaagagatgaatataatgaaaaaattaaaaaatttgctgaaacaagtagacaatcaataccttcagattttcaaattcctttagatgaaagtattattaaaggttcaaataatcatattgatgaagataattggtattttgatgaagaagatgaggatgatgacgacgaagaagaagatgatgatgaccttgatcaaatgtcttatgaagaatcagaagctgaaatgagtgaagattatgaagataatgaaaatgaaactactaagatcacaaattaagaataaagttaatatcatttcatatttctaatcttcttcatttcatatattcataaagtaaaataagtttattcttaatcatttctgtcttcttatttttaatatcttctttccatttaataccataactttgcttctgtctaatagaccttctttttttccatctttcctctcttctcatttctctttataaatatctaattaataacgattaacttgtatatctttaatctcttattgaaattccctctatttagctgtcttgccagtattgttacgtaatatcaccaaattttttttttgaagtagaaaagaatcaatatattgaagaagaagtgaaatttttatttgtctattcttataatatacctttcaatcaccccacagcaatggctaaaaaggataagaaaaataaagatgcaaagaaagcagctaaacaagctaaagctgagaaaaaagcatcaaagggtgaatctaaattgaagaaacaatctaaaaaggcaggtgatgatattgaagatgatattgatattgatgcacttcttgaacaacttgcagcagaacaagaacaatttgaagcagttcatgtaactaatatagataaaccatccaaacgtacaaatggtacaatagttgcagctccaatggctcagagaagagaattatttcttttcggtggtgaagttgcaaattctcaaggtattgttcatttttataatgatttaaatgtttattcacctgatagtgatacatggcgtcgttatattagtaaaaattctccattagctagatcatcacattcaatgtgtttccatccatcaggtataatggttttacatggtggtgaattttcatctccaaagcaaagtactttccatcattattcagatacctggattttagatgttgaaacaaaggaatgggcaaaagttgatgaaaaaagatgtccatcaggtcgtagtggtgctagaatgactgtttggaaaaattatgttattttatctggtggttttagagatttaggtacacatacaacttatttaaatgatttatggttatttgatgttatgaattataaatggactcaagttgaatttcctcaaactatgagtatgccagatccaagaagtggtcattcattaatttgttataatgatgaattaattttatatggtggttatactaaagttaaagcaggtaaaggcttacaaaagggtaaagttttaactgatacttggacacttaaaatgaaaagtgatattaaatcattgagatgggaaagaaagagaaaacaaggttggcaaccaactccaagagttggttgtagtatgcaattacataaaggtagaggttatttattcggtggtgtctatgatttagatgaaactgaggaaactttaagttctgaattttataatacattattaagttataattgtgaaacaaatagatggtttaattctaaattaaaggctcgtaagaagaaggaagttttcaagaaagaaaaagttaatagagataaagaattagaagatatattaaatgaaattttgaagaatgctaacttaaatgatgatgatgacgatgaagaaagtgaatcattgaaaactgacacagatttagaaagtaaagctgcttctgatgaagaagaagagaaaaagaaagaatatcctgttagaaaccaaatgcctcatgaaagatttaatgctttaacatgtgttatggatgatacattctatatttacggtggtatttgggaaaatggtgaagttgaatgtaatttagattctttttacaccattgatttatccaaacttgatggttgtaccgttctatgggaagatttaagtgaaatttatgcagcaactgctgattctgaagatgaattcgatgatgatgacgatgaagatgatgaagatgatgacgaggaagaaccaaccgatgctaaattaattgctgaagatgaagatgaggaagaagaggaggaagaggaagatgcaactccaactattcctgatgaaagaccatggcttccacatccaaaagcatttgaatctttacgtaatttctatgttagaacatgtgctgagtttttaacatgggttattgatcaaaacagagatactagaggtaaaggtttgaaaactaaggcatttgaattggctgaaactagatggtgggaaagaagagaagccgttcaaatggaagaagaagaattagaagaaagtggtgttgaagctgtcattgaaaaagatttctccaaggctaccaaaagaagatgattttaagcttttaaaaaggttatcgaattgtcattctaaatagagaataaataacatatttactgtaaatgtgtaaaatgcaatagaaattataatggttaatattatacaggtgtaaaaaaaacatgcttcaagcaaaatgaataccaacttgatggaatgcgtatataagttttaagaaatcagtttggtctaatttagcagatcttttatcaccaaatcctgtctcttccataactttttcaactttttctttaacaattttcgtataatctgcactatcatcatataaaatctctcccctttgttcacctaaaaattgcaagtatgttttataattcttttctaacatttctaaaattttactgtttctgaaaatagcatttaatgttttatttttacgattgaaacaaaaacgaagtaaaccatcccattcattataatcaatatttggttttgggaatttaggttcaattttaacaacacttgattcaacttttggaggtggtctaaaattattttttccaactttcataacatgtttaacatttgaccacatttgtgcattagcactcaatctattatataatgattcaccaggccttgcagttaaatttaatgcaaactctcgttgaaacattagaactgcaattcttggaggtttttgcatttccaataatctgaaaacaataccagaagaaatttgatatggagtatttgaaatacaaacatcaaaatatggtatatcttttaatttcataaaatcacccattataatttctaattttttctctaatggagtaccctgaacacgctttgttaattcagctgccatctttggatcaacttcaactgcataaacctttcttgcttgttctaaaatacgaactgttaaattacctgtaccaggaccaatttcaagaacaacatctgaaggtctaatttcagctttatcaacaataccttgtgcaataagtggatttttcaaaatatgttgacctaaatcagtattgaatttgaagactttgttaatttgtgcactacctgaaggatctggcttatttttatgaaaagttttctgtgcagcttttcccattgttatatccaatattattaaatgtgtttataatttaatatcctaatgcaatcacctgcaaatagacactctatcgataccaatgaatcaaggaatcaaaagatataaaaacagtgttaaatttcaaagaaaattcatgaaatttcaataaagtaaaaaaaaaaaattaaaatttttctcggctgtgccacattgaaaattaagtaatgcaatcattaaggaagagtagacaaactttcactggctttaagttacaatatactttctgtggatagtgttggtaagtagtaatagtacaatcatataataaagaaaaataaatggcaccaataaacaagccacctaatggagcgggctctaaaaagacaggatcaggatcttattataaatcacagaatgctactgtatcaccagaacagttacgtaaagtgagaggataccaaatgatggttgcaggtgcaattttcttacttattccttcatttgaattatatcgtagactatacgcaggtggggagagacgtatacaaattggtgaattcaatccggtcgatggatcaataaaggaatgggaagaagaagagaagataagaaatttcaaagaatcatggttaaccaaattgtttggagagaaatgatcaatgaatttattataaagtattatctttaaccccatatttcatatccaataacgttattacattaattagctctttttatttacattatcatgactatagttttacatataatttacattaacttgtttatttaaacagaggtaattctgttagctccaaattgtttccttgtacctaatgaagtagtacctcttactttgatatttcgaagttcagatgggtatctatttaataatctacttggttgtagtggttcccttttcaatttcatttctctttgtgtcattacagtggaaggtcttggtttaatttctgtggttggtgctattggtgaaatagtgcctaattttgatgatatattaaacgcaaggttttccaatcttgattctggtcggtgtattgtaggagaaatcttcgaattatcttgacgagattgtgatctacttgaagatctgctagaagatctttgtaaacttagtctagattcaggtctggaaggtaaagggattctagagtgtgatgtatttggtgacactatctttgttctgcatttcggattattaattggaattctactggtacttagcaaatttttagttggtatcgaatttgtatcttcaagttcatttacatcactcgtttctgttgttttaatcacagtggataattcaaatcttaataacggtatttgttggtttttgttctcattaggttttgatttattgtattttaaacgtgttatttgttgaggttcttcatcaatcggtaacataacatatttttgtgtgagtgaaggtctaggtgtagtcaatggtgtcattagacttttgcttgttttaccaaaatttctactatttggtgtgataaatggattaggtgaatcaaaaatattttttgctgtcattgcatcaggtgaactattggaactagaaaatgaattatctgcagatggtgtatgaggaggatggatttcatcactaatatcttcaagtatttctgtttttactcgtttaatatattctatatttgattttgagaaaacatgttcatcaataagtttaggagtttgaaacaattttttattttctttcatattttgatttgattcactcaaaactggtttcatattgagtgtttcagttaatggattactgaattttctgattgattttggattattaacccttactttatgagctggcgtttgtggaatattttcttgtaaatctctggaagttaatctcttctcaaaatcaactagtctttggaaataatatttatccatatcatataaatttgtgagaggttttagtatggtcaaagcagtttcaatgttttctgtagaatcataatctggtgtctctaaaagttgaaatattctgtcacatattaaagtaattcgttttactacatacttgtttttgaaatcttttagttccgttctaaatctattaaatgattcaactgtattctcataagatgttaaattctgtataaccaaatctttatatgtttccttagcagatttgcaaaattcatctaaagttattggaatcaagttcaatgattcagcaattggtgaaagtgtttcatggattgatgtgtaatcatcaaaaacatctatatccatgtctgaaaataaaatgaaatcttgtccagtcaaagttttagatttatataattttttcaatcgtacaaaatccattaaattagtatcagatatttttgaaatgatatcaagtctgctatttttgagttttagttccgatagtttctctaaacaacctgatatctcgtttttaacactttctattattccttctttgagttcataatggtgatttatcacagctatacgtttttgaacaggttggaaagtcttctttataccaagtatcacattgcaaatatcattcattttgtctaaaaattgatctccttcaggaacatttagttcatcaactaaacttaatgattgattaatgttgagttcaagtaagtttaaataattcattatatcacgaagttcatttttacctgctgatatccaaatgaaatcataatcatttcgtttacttaaattatcaatttcaagtattgcagaatgaatattttgtaagaatatgtatatttcatttgataaagttgtaagttttgaaaataaatcaatttcatcagttttagttgattctagtattttgtctactgtaaaatcattaattttttgattgaaagtgactatatcaacatttgagataattatttttgagatagactcataaaagcctttctttctcatttttgtgtatggttagaatgaatcaattttgttaagtgattcaagttgttattcttgcaatatttttaaagtatatagcaaagatagttactgtctacaatggaaccaaacaaagattcatgatatgaaacaaatgtaagaataaaaaatagattgattgaaatcaaaacaaactttaatgtttacaaatttcttaattgggcgattaggtaatattttacatcaatcgatttattaatgtattgctgattattgttttgagggaatgacttcttaaatgtaaatgtgttttctatatagtaaagatataaagtctataagtaacaatagttgctggtaaatcaaaacaaaaaaaaaacttcacagggtggcacttttcaccctcttaacttcaaccttggaaaaatccttgtcattttcataaccggctttgataagatcttgaatctttgaaatttctgcatctggaacaggataaggaccctttttatcgaaaagatatttgttccaatattcatcagaagtttcattaagataatggagacgatgttctataaaatcagaacaaatgtttttcatattataaccagagaacaaactaaaacttatattcaaatcatttgaacatattatatcatgaatatgttgtgttatctttaattcaaaatcaattccataaaatttgatatgattaccaaaaattctcttatttattatattatcatttgcattatatgaacgttcaccaacaattttaaatggattaagacctgcttcttccacatagaaaaacattggagtacatgagaaaacattaaatggtctacgaatatcattaaagtaatcatattcatattcaccagcttcctttaatcttgataattcatataatttcccctgtaatatgttataatcttcaattggattataatgacctgtaattgtattaatatgaccaattggttggccaattttatcagcagttttaagattttgatagtaagattttttcaaataatgtgttgcagccattaaataatcaccgtttgattcacttttagctatattcaataatgggaaatatcttgatggtccgtcatttgtataatataatgataataataacgtatcaaaattttcaattttattaattaaatataaatttgaatcagttgcatattcaggtgatgtaccctttaaatcatggaaattttgttttgcattagatgtcactttcttttgtgcttcaacaaaatctttataataatttatatctgaccatctatcatttaaaattctaattttaatattttctacatcaatacctgcaactttataaaaagttggtgaaattgttgatctataaattgtgggccataataaaagtttataatcattgaaaatttttgaattaaataataaatcagggttatgcagtggtatagttgatggagctatgaaaaaagcatttctaaaagatgatgcaagaactgaaagaacattaattgaatgtctattaaaatttaattttgataagttttttaatccgaatgtatctttcatatgaagacaggttgcatttaatgatggaaatatttcattacataatttttcatttgatgaaactgttgggggtattataacttcaattttttccttagctcctaaatcacgtaattgtttaactaataataatgagtaataatcattgtctccaccaccaactgtaacataaccattattttgataatatggaatttcaacattttcaggtattttggaaactatatttttatgctttattttcaacttctctataatttcatcatcgaaaaaatcatattcattgaaaactgtttcagacatatcacgataaatattttcgaatgtttcaactgcattaacaccaataggaaatggatcatcatcatttaaaactgaattttgaagtaatgtgaaataattttgaaaaaacttggcatatttattacctgcaatattggatactgtattatgtgaaggtataaaaaaatatgtagttgataaaatgaaaagtaaacaacaactgatagtggttacccataaggaagttctattccttggtgagtatgctttgaattcttttgatatataatttttatgatcactatacatagttgattgctttttcaagtcatccaactctgataatttgcaatcaaagaaagaaagatgaattcttatataaaactataaagttttctcttttatgagcaaatttttgatctacacgttcgactcattcgtagttatgatgttaatgataatgcatgaaaagaataaacaaatgggagcggacattaggttctccgtttgattagaacaatagaagttgttgaaagaaaataaagttcctattgtttgcaaatttataaaatatatagcttcaaaatcgatataagctttatagagggtattatttgatgatataaccagttcgtaaactcaaatttttatgaataatgaatttatgggactctacattgaaataacgtgatcggaagtgattatatctattcctcaaatatttcactgttaattctttctatacaaatataacgtagaaaaatatcgttaattcatagatccaccataataatagagttatctttgatttctcaccaaatttaagtactatctaatagggggtgttaaagaagcctatattctttttttaaaaggaacctttttggatgcatcaaacttgtcattttagcgtgtcttaacaatatatttacaaaagaaggggcccatattgttaaggttttagttataaggtggacaagagttagacaatagaaagtttgaatctaaaattttttcaaggattttccaactcattgtcgtggtttgaataataatggcccctattttcacatatattagtaatattttgttaaaataagatctaccacatcctgtagcctccgaaacttttccgaatttgataacactaacgccagttaatgtttctaacctggtctatcgctcaccaaggttaccctgttaagtatggcctgaggttaaagttttatctttttgttgtattttattgagaattaattatccaatagaattgaaagaataaaatgtacacaaactataaaaccttatttagattttaaataatcttctctgttttgctttgataataatgaacttgcactatttttcaaatgacctctatcatcaagttcaactgtacctcctgtttcaaataatgagaccttaccaagtaataatccaagagtatccagtacttgatttggatcatttaaatatgccttagcaactgtaactttatttgcaggtccaacagttattggatataatccataactaccatgtttattaatttcacgtttttcttcaatccattcgtcttcaattttatttaatgctctaaacatatcttcatcagttgtatcatctccaagacacataacaaaatctggcagttcattcatatttttactttcttgagttattggatcattacatttaactaatcttttaacaatttcacctttattaacaaattttggtctaacttcaagatttgccttacctgacataacttcaacatcatatttaccatttaatttttcaattaattcagctttacatttttctgcttggtatgatcctaaaattggatcagctttacgataatgccatgtaagtgcaactttcttcttttcagtaaatgtaccaggagttttttcattatatttactgaaaatttcttcaacaattgtttgccatgacatatctaaactttcagttaaattgatccattcttgctttttagcctttttcataaaacatccatgttctgcacttaatccaatttctggatatttagatccaatccatttttctaaaaatgcttggtcacgtccacttataatccaaacttcattatttggatcctttgttaatccttctaatatatcataaagcctaatagatggaattgcagcatttggatctctaacaattggtgttaatgtaccatcataatcaaataaaaacattctacgtgatgatgtttcataacttttcaataataaaggtttatttaaatatggggtaccttgacttgaagtttgtgttgccataaaattcattaagttggaaataactttacatgtccaatctttgttactatttttattaactgctttataaagtttattttcaatgaatgatttcttttcattacttaataataaactttcatttattgcattagcaacaccaactgaatcccatggattgacttgaattgaatcttgcaaaactgatgttgtaccactaaattcagataaaactaatggtgaacattttaatttttgacaaacaatatattctaatgcagtggtattcataccatctctaatagatgttattaaacataaatctgcaactcttaataatgcaaaatattcttccttgttaattctcatattatagtgtgaaacgggttgataattaatagttgaatattttctattaatattagaaataagttcattaacttttttttctaatttagaactatgataataaggtgtaaatgaaacttgaattaaaacaaccttttcacgccattcaggataaatatctaaaaacagttcaaaagcttgtaatttttgcacaacacctctaacagagtctaaacgatctctaccaatgataatttttctatctttattcaattctttcagaattttgattttatcttcaatttcaggtttaaatgcatctttctctaaacttttgatatcaatacctaaaggtagtgcaacaactttagatgtaaacgaatgaacagtaacttctgttggtgttgtctcataaccattaactctagaacaacaactaataaaatgtctagcaaatgaataactttggaaacctaattgattggcacctaacataccatcaagtaaaattttcctctttggtaaacatctgaaatattcagatgatgggaatggaatatgtaagaaatgacaaatataaacatcttttaattccattcttaaaagttggggtaaaagtaataaatagtaatcatgaatccaaataatatcaccaggtttagcaatttgtttaatcttagcagcataagcttcattaaatttaacataatcataccaccaagaagtttcctctttaccatcatttggttcattgatcatataatgaaatgcaggccataaaacattttcagcgtattttctccatctatgttgatcttttcttaataaccaaatagggtgaatattatcatttttattactttcttgaattttacttgtaatttcctctttatcattttctgttaaatataggggatctttatcaaatttatcaaattcatcatcctttgaatcattaaacagtttagttttattaaaattactgacaatttcaccagtccaagcaactaaatgtgtttcccattcactttcgtcgtgaagtgctttatttgaagcatataaagcagatgaaccacgtaatgttgaaactttccaatcaccactttctgttttaacaatttcatttggtaattgtgtcatacaattgatgattcttttacttgtcttaagatttgatgggaaatcatttggtgaaacccagccatatgagtcgttatttttggtcattttttaatttttgttatgtttaatatattgaatgttaaaaaaaaagaaggttatgcaattgaaggggataagtaggtaaactagtaactggggatgtatgggtatatataaacagttgaaatacgttactatacgataataataatttaaaatatcagttggccagccttaaaataaaccacggatgccgtaacgaacaaactttacagcaaaaatgaaaggtgtcaggttaatgttgcaatccggaaaagtgtcgcacttatgaagtcatcacattggcggggggcttcgcggagtgaacaatagggacacggggaattaactgttctggggaaaggcagtgaatggttatttacatgagggtatatcggttgattattaaattgtacatgcttgaagcaactttttagcaaataaacactattaaaagacaaagttataaagaatgaataagaaaaataatatgaattgaattaaattaaattaaattgaattgtagagagagaaaactcatgaacggatacatattttagaaccttctttgagtctttcaatatctgtagttgtagtagatttatcatccgatgtaacagcagcacctggagctggtgctcttctattatgttgcatatgtgattgaactaaatgaccagcagctaatgcagaacataatgataattcagaagctaaaacagctgaagcaataacttttgctaattgtcttgcatttgcaccaggttcagttgggtgtggacctttaatacctaataattctaacattgcaccttgaggttctaaaactgtaccaccaccaattgtaccaacttcaattgaaggcattgaaaccgaaattcttaaatcaccattaggtaattttttcattaatgtcatacaatttgaactttcaacattttgtgcaggatcttgacctgttgcaatataaacagcagttaataaatttgctgcatgtgcattaaatccaccaattgcaccagctaatgctgaaccaactaaatttttggaaatatttaattcaactaatgcatcaacatttgattttaaaactttttcaataacatcagatggaatatccgctgatgcaacaatacttttaccacgaccttcaatccaattaattgcagctgcctttttatcaatacaataattacctgaaattgagacaacattcatatcatcaaatccaaaatcttctgccatacatttcagtgaatgttcaacacctttagaaatcatattcatacccattgcatcacctgtagttgttttaaatctaatataaagtgaatcaccagcaatcgcagttttaatatgttgtaatcttgcaaatcttgaagttgaattaaatgcagctttcattttactttgaccttcttcagaatctaaccaatttttagctttaccagctctggttaaattagggaattgaacacatggacctctagtcataccatcagcagttaaaacagtttcaacacctccacctgcattaattgctttacaacctctcattgtagatgcaactaaacaaccttcagttgttgcaacaggaatatgaaatggtttaccatcaataataattggacctgcaacacctaatggaattggaatataacctataacattttcacaacaagcaccgaaaactctatcataatcataatttttatatggtaatttttcggttaataaaactggagcatttgcaaattttgcaattgattgtcttctaacaacaacagctctgagtttatcctctagttgtttctctaatgcatataatggtaatttacctttagtaactaattctaaaacttcagtattattacattctttaacattaccagctttcaaaatttcaactaactcatctaatggacgaattgaactttcatcaaatgatgttaaatcagattcttcatcaccagttgtattttcttcagttataatttgaccatctttaacattatcaacatttgataattcttcaattttagaatcatcattaattgatgcaattgaattttcaggtgatttctttgacttcttttttgatttcttctttgattttttagttgaagtaattgaatgtgaagttgggatttcaaatgaatcaatatcatttaatttagaactattaagaattgaattataatcagatttattcataatcatattaaatctagcaacattcaaaagataaatattaattgcaactgaaatacctgcaatcataaataaaaatttagaaattaaaggatcacagatcgcagttgataattttgagaaaattaaaacaatgtagtgttcaatttcagcaaatgctgtagccttagtataaactctaacaggtaacatagttaaaatagtattgtgagctttattattttgaatattaatatgattaacatgtaataacttctcaatatcaaatgaatcatcaattgaaatattcttaaaaacagctgaatcatcgtataaccaagaagtacctaaagcaaataaatgtaagcctaagaaacctgctaacattgcaatcttaaaaccaacaatactactattatgtttaaagatagcatttgaagtattgattgaaccttgagctacattttttgcaacatttgaactaataccttcttcttctaatacttgtcttaattcaactctacgatgaactttgaaaatttgagcttttaatgataagattgatgaaaaaaatgtaaaagtgaaaagtaaatcaacagctaaaataattgaagctaagatacagaaatttcttaagcctggtaaattttgaatgattaaagagcacagtaaaaatgagaaggaaataattaattgatctctaatcaatggaattgcagttttagatttaacaacatcagcaattatatcaggaatatctttctctgaattcttattgagagcttcaataacaggtgcagtgaatgctaatttgtgcttaaatccaatagtagcaactaagaaaggtaaaccttcacttaaagaaactaaaggaattttaatttgtaaaatttcagttgttgcagcaagagcaaataagaaagcaaaacaagatgataagattgaaccaaaggctaaccaaaaattagaaccaatttttctcatttcataaaataattgaaagaatgtaaaccacattgcagtataagctagagaaactaaaattatatcaaaaggttcagcaccgataactaaatttttcaatctaaagacaagagatttgaaatattcaaaatatttaccaatcttattatgaggagatcttaatctataaataacagaaccatcatttgattcgatagttgaaggtaaatttgaagataaagctaatgaagaatcattggaaatatttgattcagtgaaaatataaccatcataaactgaatcatcatttgaggcaataaaatttggtaaatgagatgataattctaattgattttgaactttattttcttcatttgaacctttgaaaataattggagttaaaaaccaataagaattatcataattattcaaattattaaaatctgagcctcctaataaattatcattattatcattaatttcaaatttttcccaagtatttgaatgaaatttattaataaaagtttccgaatttcttgaaatatcatttgagataaagtcatattcaatatattgatcaaatatagctaaataagcgacacaagctaacagtactgttgatacaatgaaatgaattggtttattggcacaaacatgggcaagaaaggccgggatgtcagagaatagagctgccattatgaggcaaattatattttctaatgtggaggggatatatgaacgtaccttgagtatattacccaaatgaaaatgaaataaccaatgaagacgttgtagtaataatctgaataaaccctagctaaggaactgaattttttttcagctgagcattttctcgactgtttatttttttcacagtaatttcgtggctctatattaagcttttattttttaaacgagcgcaacgattatctgtgggtgggtgtttacatttcgtgtttggtgtgcttttgaggagtagatggatggtggttgacttagtggtactgtattatggtttagggttgtatattgtagcatgcctataggacaaatttacctatagatagcatgaaagggaagatcagatatatctaagtcacctgatcagacggttattattttaaaaaaaatttcgtgtcgatatatttttacgtgtcttgcaacgggaatgggagaaatccctcatattagaattattgttgtcgatttaaatgtagagtttagtcgttttctattatagtgtatatatgggctttcatgcttaaggtgacgttaagagatgatttattggagtataaaaaatgagtcttctggggatatttcatgagactctgaaagtgaatggtaatatgattgaatgttatgcaggccagagttaaagtggattggattagattgataaaatcatttttaaattaaaagtatgaatgaattgtagagcttggaatgtattatttcttagaatttgttatgggggtgggtaagttgatactatgttcaggttttacacttcagtagactaaataatgataaaaaatatgagataactaagggataaagtgttaaagctacgctttcccttttgtactgattgaaatatcagtatggcactgatgaaaaatgtcagtgatggtgatgattggttgattgattgatttttggtaaattcggggtataaagtgttacagctacgctttcccttttgtactgattgaaatatcagtatggtactgatgaaaaatgtcagtaatgatgatgattggttgattttctgggtgattcggggtataaagtgttacagctacgcttttccttttgtactgatgaaaaatgtcagtaatgatgatgattggttgattttctgggtgattcggggtataaagtgttacagctacgcttttccttttgtactgatgaaaaatgtcagtaatgatgatgattggttgattttctgggtgattcggggtataaagtgttaaagctacgctttcccttttgtactgattgaaatatcggtatggcactgatgaaaaatgtcagtaaagatgatgaactattgacgattggatgaatgatgatggtttgtcgaagagtgagtgtattggttgattggattgggttcttggctgattgtagtggtaggatttgatggttggattaaatatttgaattggatgtttgaagtggaataatagttagttttaagactgttaaacataattttattaaatataggattggactttcagtacaggatagtcgataacttgaaagtggtaggggtaaacggatatagtatgtttggttgatttaatttctaggttaggaattctttcagtattttgaatcttattgtagttgggcaaaggtcagcgttttcctattgaataagtcacataggtttttgcacgcaaccttatgctaacagaagggtgaaatggtaatgatttgtaggtttttttaaattttccctaccaatgattaaaattcattgatcttaccactttcatacatcaaaccttcttgtgattgtagcttagatatacatgatatagataatagatcataatacattataaatacatcctcatggacagtaccacccctataccgacaacttccctcagtaatgtccatggggtgcccagcgaaatcaaaatttcaccaaccgctcaacgcaatacttaaattttcactatcgcagtaattggtagtaccatgttaatcaatgaacgattgatacagacagtcattcttttttacaacaagacatcaaaacaatggctaaagacgttatcagaccacaaaacgtacacaaatacatacatgtacctgttgcaccaaagaatgcagctgcaaactttgtttcacaaaatcttccattagctgcaatgttcttaaagaataaatctctttcatgggcatgtgcattctttgcagttcaatcatatctcaatgaaccatatattaaggatccatctgatgattcccaaccagctatatttagaatcattttctcattagttgcaattgtaactgcatatcttgaccttttattcccatctatgaacactccagttgctgctttaactcaaccaaactcttcttagatcaaattaatatatggaatcagatgctagacatttgtgttcttaaataagtactttatagtttatacattttatatatatctatactttatattaacataatatacatttttgaaatcactttttcattcttttaacgtctaatggtaaaacttttggtttcctctttaatttagtaactaaactatgttcaaatggtgaatgacatgttgggcatctttcatcacctggtatcacacttaaaatacataaacaaacagaacaaacataaccgatatcaacaactttatttgttacaaaacatgaagctcggaaatcaacacttgtattacttggtaaaacaatcattggtcttaataatggttcaatgaaaaatgcattacttaagtattgtatcagaccattaggatatttgatatccatatatacaccattagttgcatctgctgtttgttgtaagaaaattgatttctctccaagtttacaaacatcaattgatatcttcatcttttgtgctgcgaaaatggtattcatcattgaaacatatggtatcgtattatcaccactaacactaattactaatactctagccttcatatttaacgtttcttcgtgtttttgaagtttattaattgctgataatgcccttgatatagcccccgttatggtacctttgacaaaaacatcatctttattaataatatctcttaatctctcaggttcattatgaaacaatttgtctaatgtatctaatatattctcatctaataccttaaattggccataaataccaacacttttcaataaacttccatctttctcaagtattgcatcttttaggctggtttcttccgggtacactcgtttaacaccttgtgaaaaactatttgcgatataaagtgataccctattaccactattcaatgctaaatgagaattcatcataactaacatcgatgctgtaacattcctgaaatcaatcttgtcatttgtctctcggcatgatttccatgctaaaggatgcagatctaatattactgttaataatgaaggggtttcgtcaacaactctatgtatattagcggcagtgctggctgagctttctccaaatgctctatctgatatagcatccatttcctatgtgtctgtactacctgtatctagtgtaatacctctataacaaagtcttaactatagatcagggccttctagaatgttccagtttgatttcgcatcataaaaaatatttctgttacaaaatatttattaaaagcttcatggactgaactttaatgcaccattcagtgctttcctttggattatactgaacgggtaaatacatacgttacataaatggagaaattattacagtggtcaacagcacaagaatcctctgatccagaagttagagcaagagcaccagctccagatccaaaactcttagctcaagttttaggtgctgatacaggtaaagatgatattacattaatgaaagaagatataagtgttttagtatgtgaggatccacagatttcaattgatgataaattaatggcattagaagattttgaaatacttgttcaaaacttagacaatgcgaataatatttcaccaatgggtatatggcctgaaattgctaaattatacacctatgaaggtgaagaatctgatgaattcagaggtttagctgctttaattacaggtacagcagtacaaaacaatactaaatgtcaaaatgattttgtcaagattgttggacttgatggaatgaagaaattagttgcattagtttcaaagaataataattttaatgtcagagcaagagctttatatgcattaagtggtttggttggtcaccatggtgaattgtataagcttttcgaagaatctgatggttggaaagctttatctgattcattcgcagaatctttcaatgcagatgataaaaaagatactaaagttttattaagatgtttcagtttattgaaaagcttattatatgatgaagttattagcaatattgcagaggtgaaagatgaaaataaagagaaagatgttaatacagagtttcaaacagaaattgtttctaaacaagatagattcaagacattgacagataataaaattgtactctctgtaagtcaacacttatcaaaaaattcacatttcgatgttaatgaaagaataataagcgttttgagttatatctcacaaaatggttataaattttcaactgaagaatcaagtataatacataatgctttgaaagatatttctaagaatgaatataatgctaaagaagttgaatatttggaatcaatcttataattcgatgacatttttgtatgtctataatctttataaactttataaacttttctaaaaaaagatggtaaataaatttatcatacctacttatattaataactcgtcctcatttaatgatttaaacaatttacgaaacaatgcctgttgatcattcctcaataatctttccccgacaaagtcaaaaccatttttgatatctttataaaatccagcaatattatcatattttctttctgtgaagattttcttagcacgatcttctttcatattcttaaattgtgtcaaaatttcaactcctgattcaacgggatcctcctttgatttaactttaccaatatttgacagatcatcatttctttctagagcatcaatatgcttacagcttaaagtatatgcatatgatttcaaccaatcaagcatatctttcaatcctttaaacatttgaaatataacatcgtgttcaatttcatatttcaagatcttttcccgaatattgtcaggtagaatcaaatcttctaatgtttcttcaggttctgcattgtgttttttccttctcttggtggtggtactcacattgctgttatctgaacttcctttatttaatttctcttgtacttgtttagcgtgtaatttactatactttgttttcaaattttgcaaaaactgatcatatccaagaatccatattgagactttataatttttatattttagtttgactgaattaatgtgtctcttcattagtttttctttaaatagcttgattaaatcatttgcatcatacagaagtattaaaaatttttcatcgatttgtcttggaataataggaacaaaagtacttctcgtcttataatagactgaatcagtataccttgaaaacttaatgattggtaatgccaaatcttcaaaaatttcaaactttgtagtttctataaatgttgagtaatcattattgatagtcttaagttgatcgtttagtttgctagaaaacatacatgtcatcttttcagtcaactcatctttagaatatttaacttgattgatctttctcagcttttgaggttctagttcccttgatttttcatacaaaagctccaaacgttcttcggtgtataaatcaatattatctgtaacaacatcaataaatctattacgtggcagattctccatcgatgagttagaaatagtagtatcataaacgtcgtcatcttccttcttagtactttcaattgcagattgaactttacttgaatattttgagcctgtctcaatatctttattttgtctttccttttgtaaatcagatattaaattttttactgtactactttgtttctttttcatttgtttaagtttttgagtgtgatcatcatcattttctttgttttgacttaggacaatttcattcaaactactactgaaatccgagagaacagacgattgacgtctgattgaagtattgaaaatatcatttgtacttgttcttgaatttttagtcgataatgttgaagttctggtacgctcattggttctttgaatattaaaacttgttttgcttatatttttgctaacgtttgtgtctgtagatgtacgtttaattgtcttgggttttgttgagggtattgtgatcgatccaatactagatgatcttcttttcttattagtgattgggtaaggtaaaggtggatcattcatcattatactagagatatcagacattattgaagatgaaatgttggatccattattattattattattattattattattgtggttttgataggtatttcgattatttgacacatttttatttgtcactggtatttgttcatcgtcacttataattatagatatatcacgctctctgttgatattaggagaagaagttggaaatacaacatacgagtcattcacgttcccaccttcttcttcttcttcatcatctaaacatataacatctgatgatatattatcattaatatgagacttggaaggagaaatgggaggaatgtcagtatttttagttataaccttcggtctttcctttggaactccaagaagagccaaaaagtcatcctgatgatcttcaccagtctgtaaattggttgatacacgctttgttttagtatttatatcagtatctgagtctgaatctgacaataatgagaaattgttattcataatgtttcgacggtactcgccactctgttgtacattttctctactttgatcatcactatcgttctcaccatctagatctatcacctcgtatgccattttaatgctctaatctccgcccgttcagcagaaattggtgtcgttacaggatgcaaatatccagatcaacatatcaggctcactgaaacgacgcgtcatgacataaaatctccatattataaaaaagcagccaatattacccaaaaaggcaaaaggtaaacaatgaaaaattatttcataatgatgacaatagtaaagccaactttgatgattttatactataattgtttgacttaattgtgtctcttcttgtgccgttgttattaaactctgtcaccccgtttcttttgtttcgtttgctttgaaagttttttttttaaaattcattgaatttctattaatataactctattccagggtgtttttaatttgacgttttaattcttcagattacaacattttcttttttcttaattattcaagtcaggtgatactagcaaactcaaacatacactaatcatgaaaattatatcattcttcaataaaatattaactgtcctattactagcaggtgcaactttgatgttgttattcattgtattctcaggttcagttgataatttccctttcaacaaattcttttgggttgaagctgatgtttcatctctatcagttccaggtggtgattatgctagatggactttctggggtatatgttacccagatgaattagattcagcttctactagcaattgtccaaatttaggtccagatgttccaatctctccatacgataactttggcaactcagctaatttacctcaagatttcgttgacaacagtagtacttactattacttatctagattttcattcccattccttttaattgcactaatcttctccggtgtttcattaatcagttcaatcatggctccatgttggttagcaatgcaaaaagttattgttttctttgtcggtttaggttgtcttttctgtaccaccggtgcttgtttaattacatctgttgctgttttaaccagaaatcatttccgtgatgctgacatggcttctaaaattggtgcaacctctttaggtttagtatgggcttcaactgcttgtttaatgattgtatttttaacaagttgttgttcagctactcgtaaagtttacaataaggaacagcaacaatttcaacataatgtttcaactcaagctcctgttcaatatcctccaactggattaccacaaaatgatgaattaaaccaatttccccaacaagaaagttcaggtattagatttttcaaaattagaagaaatcaagaaaaagcagatggtgactctgttgtttgattttgatcattgaacttatttgactttcaaacattctaacaatttaacatttacaataaaaaattcacaaaacaaaaaaaataccaaaccgtttacctactttcattcgtttttaacaaatatttaattttaatagtatactcaaatagagtaaggaaggaactagatttatcttttctattctacaatttattatttagctttttatttttatgtaattataacattttctatattttctataaactttatatagttaatctggaatatacattcttcataaaagttctaaaatcaaaggatgacaataaatcttttcttccttcaaatattgcactaattcatgttcaaaattttctcggatcagttggttttgttgtaaacatttcaaaagtaaaatttgacagtaagtaaattcaaaaatatttggatcactgaaaagaccaaaacatccatcaattatattattttctgtaatgtattgaacaatatcattaatatttgattctactgctatggctaagttcttcaaagccttagtatttttcaattctgttttattaattatttcaatcaattctctaactttttcaatttgatttctttcggtattggatttctcaattgcaaataataatgaattggatgcaacaagatgttcaagtttcaaatcttgatcaaggaaattcaatgttttagaggtaaccaagaattcaagtaatgaaccattcttcaattgacagaaataacctaccattaatttttctgtgattataggtaaagaatattcactttcattaattttcaaaacaactttattcaaatggtttgaagaaagttcacaaattttatcatctgcatcagttaagaaattgaaaatgaatgcagttgtttgtaacttaatatgttcattatcacccttaacataatagatttcattgaatgcaattaaagccttaagtgctgaaatacgtataacaaactctaattcatcatccatcatcttctcaaccattgacatccatttgttatacatactttcatacttgttagagccataaaccattaatttggcaatatatgaggctagtgcttccactgtacttaatttgatatcttcattagtttcagatgctaaaagttctaacaattcattactatggaattccaaggtttctatgctatcactagcatcagattctataattaattctttcaaaagttgcaatgcttgtgatttgacgtacttccaagtggtattttcatctgtttctaagagcttccatatatttttgacgagtacttctgtaactttttgattgagtttataattttttaacttatttgcataatgagagatacaacttaattgtacttcgtatagtggagataataagcagttttgaataaatgaatattcttcatccccttcaactagatcaaacaataatgttgaaagttctttcagtgcaagttgtttagatccatctatctctaagtggttgtcgttgttaaaccagctgagtaactcatacttgacatttttctcttcttcagctgtaacattcagcttcagtatatttaaaatttggaagtatgtgagtttaataggataacattttatatcatttaaaaccattagacacttcttcatgaaattaatccttgtatcattatcaagctcaaataactttttagcagacttacgtgactcttcagatgataattctaaaaacttcaaaataatttccttaatagccaacaaagaaccatgaattttattgtaatcctttgattccaaattaatattctcaatcaaactatttatgattttttcaaagttgacactactgtcaatcaatgatggcaaacttctggcagccatttctctaactttccaaattttattttctaaaattttagtaataacaggaatgaattcatcaagaccattataaccaggtgttggttctaatctacacatgattgtcaaaattgggaaaactttttcaatttcactttgatcctttaatccattggtaacggaatcatttaatgcctttaaaaataattctctaattgactcaaatttctcaaaaaacaatctagctggataacttgttaaataattggctttaacttttttactactgaataaacgattttgtaatgcagtaaacaacataaccgcacagtttctaattgaccaatgtggagatgcaaacgagtttaatgttaggataaatgcttcatcaacatgataaatagattcttttgaaagtgatgcatcagtgaaaatggttttgatacaattaatagcattaacttgaggtaagtttatattattcatatcagcattcaattcctcgactggcaattgagcaatctctatcaatttcttgaatgtggaaccaactaaatccttattactaaaaagaatagctgttagtaaaaatggaataccagcagatctacgcgtaatatacttggatctagcttgaattaatttcaaattttcatctaaccattgttttggaatttcttgtaaatcctttcttgatgtgcatactgaacaacatgaaatgaatgttaaataaacagatgaaaatgctcctctatgtctaatagttgctagttgttctaataataatggaccaattgtaagaatgtttttcgatgtaattggtgacagcttaaattttaacatgacatctaacatatttgatgattctttaacacttctccaagcataacttagaataacttgtgttgctttaccatattcagcttctaattcagaggtatatttattttggaattcttccaataatataccttctggtgaatcatgttgaagtatcttttgaacaatattccaaatttctattgattttgaaatcaatttagtaaacaagtcattttcttctaaaatatttgaacattttttaaagtccatagtttcaaagatgaatttaaaagctgcaaaataaccttggttactataactaatacaagcagttgtgatatctttcttagccatattcaaagaatcatccaacctattcaataataatttgactatttgatcacatttttctaaatcattttcattttgataataattgaaagcaaactggaaaaatctagcaccagaatcaacttctttacccttaatatcgcataacatagttaatgccctattctctaacaaatgcatatcaacatgatctgttgccttgaatggtgaaattgcaataatctcagatgcaaacgttctaatgccatcatagttatccataatattatcaataaccaatcttaataatgaatctgaataaatatccaaactataaacaaaattcacttttgacttctccaagtttctcttattaactctagagtctaaacctgatttaattagtacaatcaataacttaaatgccatctcttttcttaagtatgaagagtttgatgtaagattgtgtttaatataatttaataaatattggaagaaaagcttactttcttcaacggaattaagtttatcctgggtttctacctggaatttttcatagtttttctttgttaaactttgagcatctctatgcaaagcgtatgtagaatctttaattctagaaatgaatctcttgaaacaagagaaaatttcatttcttgtttctaaactaccatcagtgaaaaccatatctaatgattttataatggtttgataagtaaatgtaggaattgcctttgataattttggtgaagatacaagtaattgaacagcagaaattctataagatgcattgttaacttgtagtaaattttggatttgctttatatcaatcaatggacgattagttgaagggtcgatttcaaggaatggttcaattaaaatagcattatcttgtgcaacttttaaagttgataatagaataggagtatcattttgtttaataatttctttaatgaacttaatagtacaagattttgaaacttggaataaatttggtaacaagtaactttcaaccccttttcttaaattttcattttgtaagctttccataacatgagattgccataggttcatccattcatcttcagaatctgcattataaacatacctaagaacgagaaaaacatttttacctataacacttcctagaactcttgaccatatattatcaagacaatcggaaataaaatttggtttcttttgtaaaataaaatcatttggcttaacatatttatgtaaatgttcaatcataaaatagaaagctctcatagtataaggcatttccaatgaagtctctaaccaggaagtgaaaatcatatctttgacatcactgtcaagaacaacattcaaatatgataacattttaataaataattccttaagagcattcccaagagcggcacctgaatcattccaaaaatcaatgacataatggaaaatgacatcagctttttccttacttagtaaatgtttaaattcatctctataacctgaatttttcgaatctaattgtaaaaatctagatatccaaatggataaagtatcacaggcaaaggtacgatattgcattgaaactgaagattcaatagtggattcatatatttcatcaaatgttcccaataattcattcttttgatcatcattagaaagttttttcaatgataaaactttttccttcagttgtttgaggtgttcattgacatttttgttctccattttagcaatttctcaaccaaacaatgagtagttacaaaagtatgatattatcacttcagtggtacacttatctaagatccgataacagattataagccccccctggtaaacctgtctaaaagaagtatacccaaagccaaaggaaataattataaaaagtcaaacctaaaaaatatcggaatcttctgcgcataatttattttgaaaaaaagtggcttgtcgactttgacattgttcggcagttcatgctcttactaagggtgttgacatgttttttgtaatgatttaatttaaagggtctctcttgtaggttatttatagacactaagaatggaggataagtacattggattgtttttggctataagttcatccttcgccatcggttcatcatttgtgttgaccaaaattggattattgaaggatggttcaagaggtgaatcattatcatatttaagtaacccagtttggataattggtacaacaatgatggcaatcggagaaatcgctaactttgcagcttatacatttgcacctccaattttagttacaccattaggtgcattatctgttattattggagcagttttagcatcaattttccttagagaaactttaggaattttaggtaaacttggatgtgcaatttgtttattaggatcaattataattgttttacatgcaccacaagataaggaaattacaacagttgatgaaattttacaatatgctggtagaccagcatttttagcatatttatttattgttggatcattctctattttcatgattttgaaaattgcaccaaaatttggttcaaaacatccaatgatttatatttcaatttgttcagctgttggatctatatctgtttgtgcaattaaagcttttggtattgcattaaaattaactttaagtggtaataatcaatttagtcatccatcaacttatattttcattgtaacagttgttgtttgtattttaacacaaatgaattattttaataaagcattagcacaattcgatacatcaattgttaatccattatattatgttacatttacaactgcaacattatgtgcatcatttattttatttggtggttttaatactacatcaacagttgatgttatttcattgttatcaggatttttaattattttcagtggagtttatttattagatatttcaagacataatccagatactgaaaatcaacaattattttcaaataatagtgaaggattaaatgatatcccattaaatagtgaattttcagcatatcaattcagaaaatcaatggagaattccagacctgaatatggtgatttagagaacagtcgtttaaataacggtagaagatcagacagttttgaaatttaaaatttaacatgaacatattcagcaaattttattttattatttatattagtcattagtattttatatcattttattttatactattttatttgatattattttatattattttattttatattattttattagatattattataatttataaaataaagtaatatacgaaaatgatttacagagaaaagaaatttgtttgtgcaaagaatgagattaaaatgaattaaatgaaaatctaaaaaagcctgtttgtatttgtaattataattgtaattgaatgataatgtcatatataatttaaaccattaaatatcatcaatatctaaatcacttgcttcatcatcatcatcatcagaatcagcaccgaattcgaaattcatatcatcttcttcatcaccaccaaaagtatcagtttgattaatcttagcagattcaggtaattcacctaatgaaactaattgtcttgcttcatctgcattatatttatgaacaacatcacattgttcatcttggaaatctcttaaagcaactaaaatgatatcaccttgagacatccaaactttctttcttaatttacctctaatatgagcaattctgacattaccatcaaaacatgaagcttgaactctaccattacctaacattttagtaatttgagcatattcttgatcttcctctcttaaaatcaactctctcttagagaaattctcgttctttcctcttcttctattcttaccacctttacccttacctttattagccattgcagtgtatagtcctctagaaaaaccacaaagaaaacctgatatatgatcaatcctcttcttcccctggacatgtcttccattcaaaatttttcactctcaaaaaaaattcactaaatctgtgcaccttattttttgcttggtattgtatctgtacatgattattcaattgtctttgctttggtagagagaagagcagggtatagaacatacacagcagtgaataaacaatcatagacaatggactcgtttgaattacagatgcagttgaataatctgctcaaatatttaccttcttccaaacaggcatcattagatatctgttctttcctaatacgaaattatgtatctcaagaggatttatatccaactttgttaacagttttaccaaatgttgatataaacacaagacttaatatatttcaatttattgaagatttcctatatttaattgttaaagatccaaaatataaaaataatgatattatttataattatgttttcctaataatcatggatttacctaaaattttacaacaaattttacctgaaactccaattttcaataatactgatgataccaatgataaaattaataaattatctgaaataagaactttatctaatttaccattttgttataaaattttaattcatatatcagaattatttaatttggaaaaattagaggattttatatcacaatacgaaaattatcaattatccaatgatgatattgaaaatattaaaaatggtaaaatgtttgatgaatctttaatatatactaataataatataaatccaagtaaatctagtcatgtggatgactatataaataatgaaaccaataatattaatgataaaaatgaaaattcttcacaattagaatcaaattatatacctgaaaagattaatcaaggattaacggaatcttggaattttatcatatctaaaagaaaacaaagtcaatatgaaagtatgctattgaatatgttagatgatcctttccatataaaagaatttgaaatgaaccaaaaattaaattcaaacaatgatgataaatcttcaaagacaccttcaaagacgccatctaaaactccattgaaaactccattaaaaactccgttaaaatcacttaattcattacaagaatcatcttcgaaaccttcctcagcacctccaaaacatgttctctcattatctcattctttaatcatgcaaaggattgaagctgatagagaaaggcaaaaacgtggaaaggaaactttatgggaagttgaaagaatcgataataaaatttcaatatctgaatttaaaaatattttcaatactttaccatcttataatccagttgatgataaaccttcacttgatgaaatgaataaattatacaatatgtgtacattcactaattatcaagataataatagtaataataatattaaatatgatttaccaacaggtccaaaaccacattctgaacaaatatcgtcgactaaatcgaataataattcaaattcaaataataaattatctaaatgggaattagaacaaaaacgacaaatgtataaaccctcacaaactcaacaacgttcacttcaagctcaacaatcacaaatgagaagaggtaataaatattcaaaaaaaaatcaacaaaatcaatattcaaaacaatactatcatgatcagcattatgactcaaatggaagaattggtaataacaatattgattatagggattatagaaattcttattatgatgaaactcaaatgaatggttatgataatgttgattataataccaattatggatatcctcaagaacgtccttcgagatccaaaaataactataacaatagtcataacaatgacaatccaaagagaagaagaagataaaactgtcgtcatattatgggaagaaaaacaatatttgtataaattcccagttgtataattaattattcatttctaataaattaataatctaaagaagaaaaaaactataaaaaaacacgtatctaaagtatctaatctaataaagtcatgaggttattaataccctttaatgaatattttgctgaaattctttgtttacctgattttccaacacaaaccgatataacattaccattattagaatcattattttccactaaagtgttgaaaaatgtatataattcttcatcaatacgtgtatttgaacctgcaataaagaaatgtttataaggtttataaccttcacttaatggtgataatgatgacattatactatccaaattaagactactagttgatgttgcaatttgcattggaatacctgttaatataggtgatgaaacatgtgatgatgagttagatctatccattgttgtttggaaaactggtgttgttgatgaaaatgattcatttaattgtaattgtgtaatattttcattattaatagtttgttgtgatatgcatactaaagatttattaattagattcatttctttaataactaataatcccttagaaatacttgcatgaatattataatctttactaaacagttcattaatatgtgtaattaaatcaccaattaatccatttctataatctttatcaatattagatgaattatctgtatggaatataacagtacattcttcaacttcaatatatgatcctggtaatctctcacaaaatgaattaagaatttcaacaactgatggtatccattctttttcagattcttcaataactgtaaaccatttatttgatctaggtaatttaattaatccaccattttcagcaataagtccaactgcaggtaatcttctatacattctcaataattcacttctttgaaataatgaaaatatgaaaacatcattgtttggatcagatgataatttatataaagttttatctattaattgttgttgtaatgaattaataacttggccatgaatctctaacttagcagttatatcatctaaatttaagatataaagttttttaccatcttcattttcatttatgaaaccattatcatatttttcctttgttaaaggttctaaaactgtaaaggtttgagcaaaattcaaattttcatatgctaaattaatatcttcaagacattttttaacccatgttttggaatcatttttcaaaacatcttgaaatgtattactccatctttcagttttctcggattcattcatattaagacaatcataaatttgttgtgaaacttgtttaatattataaggattggaaataaatggaccattatttaaaacaaaggcggatccaacaaattcacttaaaattaatggggaatgtaatttttgtgttgcacaaataaattcatgacaagttaaattcataccttctcttaaagttgaaacaataaataaattagcctttgctaataatgcaatatattgttcaaattcaatatctctatttaataaaataattggttgatcggttgatatatttttagttctagaattaattctttccacgattgataaaacttcatttttatattcatcatcacttgtacctccattaatacagattaaaattaatatcgtatcatttatatattcaggatgatcattcaaaaatctttcatatgctaataatttttcctttaatcctctaattttatcaattttatctctactaacaattaattttttattagaccatcttttagagattaaatttttccaattagcaacaacacttgattgtaattgattatttaattcattaaaatctaaaccaattggattatatgaaacaactgttaaatgatctttatagaaaacaccatattcattaaaatcggctaataataatctatttgaacattgtaagaaatgtgccatatattcttcattttgaaatgtaatacaatctgcacctaacataccttctaaaatctttttacgttgagctaaacaacggaaaacttcacttgatgggaaactaatatgtaagaaaaatccaattttcacatgtgggattaattttcttaacattgaaggtactaacattaaatgataatcatgaatccaaactgtatcaccatctttataatcttttgcaattttatctgcaaagatttgatttgccatttcataatatttccaagatttattttcaaatgcattagaatttggattatcaggtatttgataatgaaatattggccataaaatttgtttacaaaatgattgataatgaccttgaaaaatttcatcatcaaggaatacaacttctgaatcgtaattatcttttaattcatttgagatattttctttaatatcgtttggaataatatctgatgcaactgatgttgtgccaacccatttaaatttttcaactccatccttttgagctaattgaacactattgattaaactcatattaccttttttaaagtcaacaacttcccatttagcattacgaaataaagaattcttatcagttgaaaatttatgaggtcttgaaaatccaccaaatggtacaactttatcacaatcacttaatataccataaaaaccaccttcttcactattcatcagttttgtaaaatcttcagaaatacgatcaggttgatattctcttaaatttgagacatggatatcatcacttgtatcgtcatccactgcatgttcattatcatcatgttcatcgttatcatttttgtttttatttgatagattatttaatttatcatcaagtgtaattatacttgaagttttcaaatttcttaaactacttggattattaaaacttcttctaattctcatacttgataattttggttgagtttcacctttatgaatatcagtaactaaagtttgttgagattctgtagttttaataattgatttaggtttaacaattgttgaagaattcaaactaactggtgaataacttgatatacttctgaatgattcatttaatggagaatgatcagtaacttttccttcaagtttttcttgatataatgattgaactgacttagataatgacttaacatcatctagtgatgttgtattacttaacggcattgtagccttattaggattattaaagaagaaatcctccacagagattgattcttcattatttgatcccaaaagatgggaatattgagactgtaaatgaaaacttgaatgagaatgtgaattggtattaagactatgatgtggatgtgggtgatgatgattctgatgatgttgtaatgaatgagttttagttaatttttcctcataataagtatcactctcagttgaagcaattgaatctaaatcatcgatatcatcatgattaatattacttatattcatagtatcattaatttgattaactgatgaattagatttagatacatcattagataaatattcaataattgaaacatcattatgttcattttcatgatttttcaataatgttgggttagtttcattaagttcagattgtttatctgccttgattggttcaaaataatctgctaatgtttcatcggttgcaaaatctgctgatccgatgttcaataattcaaattggactgtgtatggtaagaatctatattaattggataaaaagtataggatgtttaaattgttagtaaaagctgttaaaaaaaaatttattgacctttttcaaagtcaattatgtttaatacatacagtgatgccacataaatcgtcatttttgttagatatttgttgtttaggaaaagagaagagtaataaaaggaaaagataattaataaaggacaggtagaaaaagtgtactatataatttgtagaattgtgcatgtcatcttaaattttaagaaattagaaattccaaaaatttaatgtgccacttttccttcagccttattaatgtgacctcgtggagtgagtactttgaatttgttattgatagttgataagcagtatatcaagtgttgttatttctatataaaactagtaatacacaatacaaatatctctaaacattaatacagtatatatcatggatggtgttctgattaaattaaatcaaattcaatcaaattaaataaaatctctattttttttattattttttagtaagttttttccaaatttattaaattagtattggtaaacttaaattaaagcagataaaccaactgcgaaaacagcaaacatgcctgatgcgatgatagcatttgcacctgaatcataagtagtttcatcttcgtcagaattaaaattagttgaattagttgaaacattttttgaaactggtatagcatcaataatttcagattcttcatttgataattctctagttaatttactttttctcttaagtttaatattaccacaagaaattttattattttctgaatcagtaataactaaagatttaccaccaacataagcagaatttttagaatttaatgaaagataagagtcaatatattgagtttcaaaacatgttgtattaatgaaaccatgtttaccagataaatcaccaactttacataaagaatcattatcaaattcatcacaaacggtattatcagcattataaggattgaaagtttcaccagcatctccacaattaccagaagaagaaacttttgaatcataaatatgatattggaaaggacctttatttggaggtaaaccagtaacatctaaatgaacattaacagaaccttcattattagaagtgaattcaatgatacctttaactaaacctttatcaagatgagctcttgcaactgattttggagaactatcagtattaacaggtgcttcatctgcattaactaaagtacctaaaagaatagttgattgaactaaatttttaattgaaaccattttttataataattttatgagaaatacgattaagtaaagaatacaagtaagatattacaagcaaagaagaatagctttatttggataagaaagaaagctttttgatgaaggaaagagattgaaaagaagttaaagaaaacaaaagcaagaagaagaaagaagtagtaaataggaggcaactcagaatgaaaggcaaatgtgttgtttaaatacaagaaaatcaataatattcaaggatattgttttaactgcctaatcaggaaacttttaataaattgccccttttagttaccctgaatctgaatttttttcatgttgccttgtttttttacccttttagagatttcctatttgagaagaatacgaaaaagaaaatattatttaaaaaagaaaaaaaaaaaatttcaaattttcaaattttgacgttatcaaacaatattacgtaattattgataaagttagtactgctattacttagtgataaggactctatatttaaaaatgacagttcccatgacaaggagggaaaaaattactattaatagtttatctttacagtataaatcttatctagtcttatctagtcttatctaatcttatctttatatcactattttatgcctttgataagaatatcatcattattattactattactattattatcattattatttaatagaaacacattaattcccgtaagattccggatatcatggtattaatcatctcatgatgtaattttaatttttagtataatctgtacaccataatagagctaatattactaataataatcttacaaaacattacgtaacacataataaaaactcataggaaaccaacaatctaaaaaatttactgactgtatcatccatttttccaaatttttttctagtttcctcgaccattattgattagatagctaattatttttcatttcactaaatttttcatttccattttcattttttttatgggttttttttatcttttatcttttttatcttttgtgtgtattatgatgttatagtctttttatctttttatcttttaatcctttgatctttctcgtattactatcatatcttttattatatcccctctatatccttatttcatataacttatacacaagatggctatggcggacaatatctctgaacaaaatagaaatatgagtcccttatcaattaatccacttaataatacttcttctgttgttgttaataatttacatgctgctttacaacctttatcaaatcaatcatctactataatctcacctaataatctttctaataatctttcaaactcttcaaaattattaaatcaaaatatcaataataaaaacactatctcaaatcaacaacaatcttcaaataatactaccactactactaataccacttcaacaaatcatttcccacttccaactccattatcaaacccatctcttaatcatccaatgtcaaatcctatcactcattcaaatatacctttatcaactactaccaacccaaatcctacttcaaataatacaccattatcttcaactattcaacaacattcaaaatctgagagtaatatcgatatcaatgataataataataaaaacaatactaataacaataatactattcctagtaataacagtgatgatgatgaaaatttaaagaaagatttagatcatattgtaccaaatgcaaagacaacaacaacaactcaatcaaatggttcaattacaacaaagcaaaatatgacaactccaacttgtaaaaattgtaaaactcaaacaactcctctttggagaagagatgaaactggtcaagttttatgtaatgcttgtggtttatttttaaagctgcatggtcgtccaagaccaatatctttgaaaagtgatgttattaaatcaagaaatagagttaaacataataataaatcttctccaaatactccagaattaaaggctaaagattcaaatggtattccaaattcaagtattcattcacttaataatggcaattttaataataatacaaataatgctaataatgctaatttgaatttaaataataaaatttcaactaaatttttaccaaaacaatataaaccaagttcaaatactataaatggttcaccaactagtaataatatcaacaatatcaataataataatacaccttcaacaaagggtaaaggtaaaaaatattcaaaattagattcaaaagattctaataaacttcaacaatcattaaattcaattaattctaaaattccaaaacaaaaattggactcaaattcaactttatcaatcaataatttaacttcaccaagtttattacctttattaccaagaagtggacaacaaaatccaattgtaaacaattattcaacaaataattcatggttaaataaatctcaagtacatggtcatattcaaggtccaaatattcaatcattacattatccttcatcaactccaactcattttgtatctgatctgaatagaattacctctcctcttttattagcaacaacaactccaccaaaattaaatgcaactccaactcaatctcaatcatctgaaagatcatcatctaaaaatggtaatggtaatttaaatagagatgcagtattaaatgcggctggtgcattggaaattttaagtcaaactgcttcaaataaaatttctaataatgttaattcaactacaaatacaggttcaaatccaacttcaaactcaaattcaaactcaaattcaaaccctaattcaaattgtaaaaataataatgattttataccaggaatgagattaaattctccaaatgttacaccattatcaaaacctatgtttaataatgataataaattattaccaattaatttacgtcaacaaaatgaatcagttgaaactaaagttaaatcagaaccaattcatttacataatattttaacgccgaataatgaatctgaaaataataatacaattaatactgatcaaaataatgaatcacgacaatcaacagaaacttcattacctccaattaaatcttttacaagcccacttttatcaggtcaaataaataatcaacagcaagttcaacaacaagttcaacaacaaattcagcaacaagaaaatcattatgttacaagtaatcaacattcaatttcttcattacaacaaaatacattaccttcattaaagaatttaccaggtatttccaatgtaatatacaattctgaatctaataacaataatagtaataataatatacaagaagagaatgagagattacgtacaagaaataatgaacttgaattagtgaatgaattgtataaaactagaattgcagaacttgaacaacttgataagaagaaaagtttaattattgaagaatatgaagaaagatttaagaatatcaataataccaatgatatctcaaatttaaatttaaataattcaaattcagaaaaacgtaatgcacctaatgacgattcaatgaataaaagagtaaaggttgaaaattaatgggggtatatataaagttttatatcattttgttttttctcttattagtttcatgtctataatgtaaataataataataatttttatcagattttaggtttatatataaaattaaagtaaactaccaaaattggaatttttaggagcgtcatgaatttttcatgatccacaaaaacagaatcaaaaaattccatcatttaattttatgcaggcaaatatccaaattgtaatgaataacgaagatacaatagcaagtctttatttacaagtaaagaatgaagttactaatattcaaggtaaattaacatttgaaaaattccaaaaaattcataaagattttataaaattaagttcattaattgataaagcagatttattttcaaataatgaaaatttcaaggaaattccttttgataatattaaatatttaataattaattttgatcatggtaaatttttagataaatatgctgttagttcacaattatcaaatgattcggatcctttgaaacgtaataaattaagaattttagttttagaaattgttgaatcaatgatttggaaatttattaaattagttgtgattgatttgaagatatttgattatttgaaaatcattaatgattcaagtgtttataatgagttaaataattggattatgaattattatgaattaagacaaaatgaaatctcaaataatggtagtaaagggtttgttaaattaaatgaattagaacaaattaattttaaaaaatcaactccaatggagagacgtgatatgaaaataaataaatggaaattagagaaagaactaaaggaaagaatcaaaatattagatgaaaatgatattaagaatggtgaaaataatgatgatttagataattttaataaatttgatgatgatgtcatgagaagggtaagaattgatcaaatagtattggcaataactgaaagtataagtatgttagaaaattttgcaatggaaagagaaatgttaacacatgttgtaggtaatgctattgatgaagaattaaaggaattaagacttggtgatttgagacttaaggaaataagagaggaagagaatgattcaagaaccaagggtaaatttgataaaggattcacggataaagtggaatatttgaataaagataataaaaataatataataagtaaagaaggtaaagtacttcagccatttacaatcgttccatctaatgaaaagagaaaggaattacaaggtaaagtttttggcaccggacaagagttacctacaatgacagttgaggaattagttgattatgaattagctaatggaggtatggttaagccaagtgaacctgaacctgaaattgatgaagatgattataaatggcaagatagtgaaacttatagactacgtgattgggataattttactgatgagaatagaaaaggtagtggtaataaaatgagtaatttaggatgatctatattgtctatttcatgtttaatctgtgtagattcatgaagaactatgttgactcttcttttcatttatttattatgtatactcttacacgtgacactaacgatttgaaaattattttttgattcagtgtaaaacgcgtgtaggtgtccatttattatgtaatttgttattgtaaaaataatttcaacactcttgtcaaacaaagcaacaaattattattgattcgttgttgatttatttaaaattctttgatctcttttttcaacatagtaacaatttcttcaataaacaatgtctagttttgttcctgcacaatttaactctttcacaaacaattttgactttgatgtgcttaaggtaagttttatatccgcttaatgttttacccgtttcatatacaaaacatgatactaacatccttcatcaatcaactattacaggcagataccccatcaagtttcattgataaatttaaaaatatgaagaagcctaatgatttctttgatttttcaagaatgtgtaaaccaaatggatttattgatgctcaacaaagaatttcatttaatttatcatattttgcatcaaattattttgcaattgtcattttattcttcctttactgtattttcacaaatattccatttttcattttcctatttgctgaattaactttaatatatttcgttcaaaaacattatggtcaagctgaagaattcgatcttaaagttttcacacttcatagaaatatttggtatactatcctattagtcgttaacgttcctgtgttttttatttggagtcctttatcttctgtcttttggctgtcaatcttcagtgctgcgattattgtatctcatgcggctataatggataaacctgttgaaactgcttacagtgatgttgtttaaatttttacttgaatttatatcaatttaggtgtgtacataatacagttttataatagataactatatattctcgttattacatgtttgtgtatgttattcagatcgatgtatcttgtattctcgtatcaatgtactcaattaatgtttacgtaaaaatttatgccacaacaaaccatttgtcgtgattttcttataatattatctgtaatgttgatttagtaggtattttcactattgaagtgataatattaatgtaagagtaatagttaatatgctactttggtataagcttaatttttaaaagttaagaaagctttttttaaataataataatttgctaatctcttcatattttcaaaaatacaagtttgaaattgttttttggtaaaaagtaaactttttttctaaaatattacatttttactatccacttaaagcctttgagctacaaaaataaatagatacaataccagcattaaatctacctaactaagtttaaacattataatcaaaaccgttatatccacccttatatattcagataaagacttcaaataattttttgttggaaggcgctgatttatgaattgaccccaaaatataaaactaggccaacctcctccattatgagccattccttttcttttgaaatcatcaatatgggtaaggttaaaaggcctcaatccgtcatgttacgaataactcacgcaatcatactattatcccttttattactactatggtattcaatcagtgaatacagggagagttctgaaaacatacttcatgataaggaaataattaacgtagaactcagcgatgataatgatgatgataatatacaaatctcattcaatcttaaacatatatacaatgaattaccatcagttggcagtttagcgttagatatagtagatgatgatactcataatataaatacattgaaattatctacactcaaaacagctgatattgatatttcatgtagtataaaggctaaaaagtcaaagataaaaagattaaagaatcggtcaccatcaatggtcgaatcttatatctatcattcattagaaaatccacacattaatacagaagattcaattgagtggtcaattgataatgttttagttcctgatataaaagatccggaaactattttacagttagccaaattggcttcaaacgcatattcaaagttaccagaggatccatcatggagaaatgttagtgatccaggatctaattttggagttggatttaatataagtgatagttttggttggttagaaaatggacttagaggtcatgttttcattgagcaattagattctaaaactgccaaaaaaagagcaccattaattataattgctataaagggaacaacagcagctggcataacatctataggtggtgataaagatacagatgatgcaacaggagatgatggcaaaacaattgagctggataaaataaatgataatttattattttcatgttgttgtgcaagagtatcttcattatggacaacagtatgtgattgttatgaaaaaacatacacatgtaatcaaaattgtttagaaagatctcttagaaaaccagacagatactatgaagcagttttgaatatttatagaaaggttttaaatttataccctgatagtgaagtttgggttacaggtcattcacttggtggtgcaatgtcatcactattaggtagaacatatggattaccagttgtgacctttgaaacacctggtgaaatgttagcaactaagagattacatttaccaatgccaccgggattacctgttgaaatggaacatatttggcattttggtaataatgcagacccaatttttatgggtgtctgtaatggtgcatcatcaagttgtagtatagcaggttatgcaatggaaagtttttgtcattcaggtatgaaatgtacatatgatacaattaatgaattagggtggcatgttaatattttgaatcatcgtcttaaaaatgttattgataatttattaatgttgtcaaatgaaactgctgtttgtgaaaaacctccaccatgtgttgattgctatgattggacttttgtcgatcataatgaaaataaaagacgcacaccaaaacatccatcatcttcaaccacacctcttccaacctcaacacatgaacctaaaccaagaaaatgtttgaaaagaacttggtatggatcatgttataaatggtctgatgatgatgatgatgatgatagtaagagtttatcttatagttacaacatttagttagtgcttttcatttttttgtttattcattttatatttttgttttacattttttatacggttttatacggtttttatacggtttctgattcatataaggttttaatttttatattgttttattttagtttatattataaacattactttaatatacaatttgcacggcatataattttttcattgataaaaatagacacgcgtacacattgcaatttttttttgatattacccaatgacgcgttaaaatttccaaaagattcatcgatcaacttctctgttgaccttgttctttatcaatcaaccaatttcatatgtttaaaaaggctaaaagaagaacatacggtcgtcgtaatgctgacgaaccagttacatttctgtcaggacccgatgatcaaactctattgaaagaatatccagatactttatcattttataaactaccaccaaccacagaaatcacattaaatgaatttgaactttatgcaattgatagattaaagattttaatagaaataggtaatttacaaagtcaaggtactaaatatacagatttgattaaattaatgagtgaaagagttaaattactcataccattacattcaacaaatacacttgaacctgaattattattaaaggaaagacgtaaggatcattattcacattttattcttcgtttagcattttgtagaaatgaagagttaaggaggaaatttgttaatgctgaaacttttttgtttaagttgagatattcacaattaactaaagcagaaaaacaacaatttatttccaaattagatctcgtttggggtgaagttagtgatgaagagaaggaaagtcttaaagataaattgattgctacacattataatgatatagtgatgggatttaaacaaggtacattaggtgcatcttcaagttatacacagcgttcatcgtacaatgaagaggatatttgggcatgtattaaaaatgaaaaattaagtaaattaccttggagtgatgtcacagatttagtttctactagaaaagttgtattatttaaaggttatgcatacgtacccgaatttctacaaatgaatttattggcgaacgaattttcaaagtttttagaggaacaattattagcaacattaaagttattaccaggtttggatgaagatgaaagattagttcctatcttagataatatttccaaaggttatattagcagtgaattcacaggatttgcagaaggtgatattgaaaacgattctgaagttcatgctagtaatgttaaacaatttgaaaaatatttccctgcctgtgctcatagattaatggatggtttagaggaacatcatcatttaagatatacaggtagacaacaattttccctatttttgaaaggtataggattagggcctaacgaagcattgaaattctggcaaatgatgtttacaaatggtccaggtggtgtaacgattgaaaaatttaataaggaatataagtataatattagacatacttatggtttagaaggtgcccgtataagttataaaccatggagttgttcattaattttatctaaaccaaaaccaaataagcaagaatatcacggttgtccatatagagatttacaaactgataatttaactgcattattgaagagaatgggtatgaaggatgatggtaatttacaaaaagttgttgaattaagtgattcaaaagaatatcaaactgcatgtacaaaagttttcgaagttcttaatgctgaaaatatacaagccaacatgagtaaaggactgaatgtcatggaagctcaaatatctcatccaaacgattatttcaatagggcattactctatgaaaagcgtttacatggtgaatctcaagcagattagttaatttattcatttgtaataactttataataaacggtaaaagaagataaagggtagtatagttttatctccggaacactatgatatgtcggacataaattttcgggtaaaatttttattaagaaacttcgatctcatcctctgaccttagattgttgtttaacctgcaggcagatatgatctcttcttgtagaagtatctccagtggacagacacaatgtcggaaactttgttaggctcatcaatatcgaaggcaggaatgccgtttaaattttttagtaagaagtcatcacaatcacctaaacaaccatcacagtttgttccatcaacaccaaacatgccgataggtggtaaacctgtgatatcacccgttacaccaacattgatggatgcatcattcaagggggagagaagaagagctgctgtattggaacagcaacttagagaagttagtttaacagcatcaaaagcttatgatacgatagatgatttgaaacttaaaaatgaatcattacaagaacaagttgatcaacaaaaactattaattgaatcatttaacaaacaaatagaagatttgaaaaatgaaaaaatccaatttaaaaaacttcaagatgatgagataaaggagaaaatggtagagaaaagtaaagatcatgaagaaatatcaaatttacgacatgaaaaagatatgatggctatagaaaacgaaagtttgagagatgaaatacaaaagttgaaaaccatgtataatgatatgagtaggtcaatgacatcaagagaagaaagagatactacacaagatgaaatctccccgtcaagggaaaatgaatacagacaaatcatcaacatgcttgaagataagattagagaattagaacaattgttgcaaagcaagacgaataactatgagaaatccatatcaacattacagagctcaatgagtgttctcaacgatagcaagatgttcttaaacaaacgtttccattctactacggaggatatttcaatgtacaaagaatcaactgaaatgaatttgactttgaataaggatgaaggtgatacttttgttgtaacaaatttgtcattcttaccatgattttattattattattacttcttcatataccagacttttttttccatttccatttctttttattttcttgtttgtatttgtatctagaactgtatattattttaatcaatgcattatatcgttaaaaaaagtacatcaaattgggagtaatgtaagacacgcggtataattttacttagagggtcaattttgttaaaacatgctccatggaacaacctaacttcttttcaacaagcacaatatgcagataataactccagctatacgattctttgtggcatttatactactctgtataaatttgacacatgctgcattaccaattgaggaattacagacctcaattagtgtagaagacccaatttataatgtcagagcaggtgaacttgaaatggtacttgatgatgttaagaaatataatatgattgttttagtaactacatccgaaccaagatatcaatgtgaaatgtgtggacaatttgatccaatatttaaaaaaattgtaaccaatatctacactacatatccagatttgatgaaaaatacatttttcataagagttgaagcatcaaataaccttgaacatttgaaaaaattaggtattaaatcagttccacagatttgggggtttccagattcaagaattgccattggtgaagaaaaatttgttaaagttgaaagagaattaatgaaatataaagctgcaatatcggaaggtactgaatatattaaaccagattggtatgatattgatcaagctggtatggaacattatattatggaaatggcaaagggagattcatgggatgttgttatacaaaaattaacaggatttattagtaatactataaggtttgatgttaataatggcgttttagcaagaactaatgataagaaagctgaatttgattgggttgtctcagttcaatggtttatttatgtttttattggtattaaagttttccaaaagataaaggcaacatcaagtacatctacaccattatgggtggataaaagattttatgcatatatttcaattgtacttatacttgttaatatatcaggatttaattttaccattcaaagacattcaccatttatttcacagagagacggtaaaattttgtggattgcacctcaatcaaatttacaatttggaagtgaaattgcaattagtatattgttacaaatattttatattgttgcattatatgtcttggcttcctccaatagttttaaaattgatcaaaatataagggatgttatgataagtatatcatgtttagtattgattggattattaatagtcggctcagcaatatataatgttaaaagtccgtcatatcctttcaattatctatggtagttttcaaaaaaaggatagaaatttcaaaatatagagaatataaaatatatagcatatagaatatctaaaaacttttgttgtttattaattgttagtaaatttttcgttgatgattagaataattggttttcttctgattcgatttgttcatttttattaatccagtaaaaagaaaagcaaaccaagaaagcaccaagaaagtaaattggtgaatttaatttaaatttaaagaatatatcacaaatcaatgccaatggaattgttaaacataaaccaacagtaacagttaatggggaagttaaaagcattgctcttgcccataggaaatctgctaagaatgaaatgatacaattgaacaatataacagaccatacataacctgaagatggtaactcaaaatgttcaatatctaagtaatgaactataactaatgaaggccatagtaagaaggtattgaaaacaccaacaaacccaaaaaataatttcatatccattcttgaatcatctttaacttttaatttgagtaatattgaataaataccataacataaagctcctaataaagccagtatatcacctgttaatatatccgtaaatgaatatgaatcatttgtttgaggtttatcatttaatgtaacacataaaactccaataaataaccctataagcgatattattttagttttgtcaaaagattcctgactaaagatataaccaacaatcattgtgaaaaatgatgaagttgaagataaaatagtttgagaggagactgatgtgaatagtagggatgcattattaaagaaatttgaagaaaaccaaagaatacaaaatgaaaatgataattgtaaagtttctctaaatgttaaaggatgcaatttattagaatgtaacatatttggttctgaatcattattatgttcatgatatgaatgaatgtaaggattattgttgttatttagtaaagaattattgatattattattattattgattgtataatcattatcatcattattaatagttgtatcgataaatggtaattttaaatctttatttttccaagttttgaaataataaggaatgaggtaaaacacaaatgaagcggtattaaaccaagtaataaagaaaggtttactgtaaatacctttttcaaataaatcattaagtaaaaatgaagataaaacccataaaaccaccacacaacagaggaaaaacaagcctaaagaccattctttcgatcgtttggaagcctcagacgatcccggaaactctagaatagccatttgatgaaagaatgtgtacttttgactaaatttaatggcaaaattgataaagataaaagcattaaaacatgcccatgaaatgaaatttgataaagggtagtagaagtcaaaagacctaaacgaaacagagacgcgactgtgcgtcattataatttttcaattttcaaatatttttttttttctggacgaacagtttttgcggagagtttactctgactgaaatttcacttctgaagaggtgatagtataagggcaagacttgtgtgcttttaataggtaaaggtaatgtggttattcggaggttcatcaaagaaacaagaagataatacagttattgcatcagctccatcatctgaatttgtatcagagaaatcaaatacaccagaaataacgaatagtttacaatcatcatttccgacaattccaacatttgatgcaagtaaacttcatccacttgcaggtttagataaagaattagaatatcttgagttagatgatgaaaaattaagtactattaaaggtacaggtaatggtattttaccatctcgtggttggtcagatgatttatgttacggtacaggtactttatatgttagtggtttaggacttggtggtttaattggttttaatgaaggtttaaaaaatttaccaagtggaagtattgatcatgtaacaggtgttgttaaacctgctccatttaaattaaaattaaatacagttttaaatcaagttacaaaacatggtcctcatattggtaattcagctggtgttttaggtttattatataatattattgattcaagtttggatgcttatagaggtcaacatgatgatttaaattcacttttatccggtgccttagcaggtgcaatttttaaaagtacatcaggtattaaagcaatgggttatagtactggtatgatgacgttagcagctgcaacttggtgtggatttaagagattaatcaattaattttaattttgaatcaatataatgatatactatataatcttgtgcatataaattattttataattataaactaaacaaactatttgaaaatattaaaagaataatgcctatacttgtaattttatcattttttccatttgacaacaattaaacagtaatgtgaatttattagattaaattcttcaatttcatctaaccattcaagcgatgttaatcttttattttcttcacatgttatgctattctcataaacccatttcatatcattacaccaaattgagaaattatcgttattataattttcgaaaattttcttgaaacgttcaatttgtaattcaacgctattataaaccatcaaacttggcattttcaatcctctagaatttaagttattgaccataactttaccataatttagattatcagtagttgaaccaccgattggttcataaattaaaaattcagatgatggatttgtaacaatattatttttccaaaaattaagtaaattgtctgcatcatcaacggaaagataacatatacaacattcacttataattaaagttggtacatttgtatctatttgttgaaattgttggaaatctgaaagtttcatgtttgatttaatttgctttaaatcaaatggaatcaatttatacttaggtgtggataattcagggttaaatgaaagtacatcatttgatgtaattggtaaatcttctatgtttaatggatttatccccacttgttttgataagattggtgatgattgaatagctaaagattttaatctagtagtttgttccatatcaagttcaaaatatattaaattaccatattgcggaattaattggaaaggtcttgtatcattacctgcacctagggagattatttgaattttattagcattctcatttattttgataaaatcattaatcttttcattaattgacatcgtacgtaaataagtacctctattaatcattggagatttcaaaggtgaaaatttattaatttttttaaaatatgaatcattatttgtatttaatatattacttatattaatatgagataactgaaataaatcgaaaaaagttgatttaagtttccttcgtaatgaatttcttaagaatgtattctcaattgataatagattgtagtaaagtaataaaggtattaaattaagaatatattcatcattaaaatattttttcatatgacatgaaagtctagaggataatgcatcataatcagtttgttgaattgcatcttcagacgagttcattgtgattgaacaaaagagaaaagataatttaatgcaattccattttatgatcccggtattacaaataattgagaaatttcatgtaatcaatcatgacagaaactgttgttgtattgcagtattacataatcaataatgaaaaaaaattgttggtctgagaaagttgacgtcagagggccttaattaacgacatctttaacgcatgtattgtaagcagaattgtaacgtttaatatatcctttcctatgaacttctacggtatggatgatgtcactgtagttaatgttgaataactattaacataatattagtatctcaacaaagattgttgatagtatgtagactagtagtgtgaacttagtgttatccacctccctgtaattttcttggaggctcagctgttaaatattctgtagaaagaagatcaattcttcactgatatatagtatgtatagtataccattttgtatactgggaaaataacacggtaatgtagattacaagtaaatacatacaacataacaaactcacatcctatacaccttatctactatctcatcacataaacgtacattctacaacattccaaacaccagcaccccatgaattaataaaataaaatcgatgagccgtggtcaatagcgctggcagtgagaaaaaaacttgttggtcccaaccatactaaattgagagattcggcgctattactttttataaatacacattacacgtctttaaatggtactgaattcttcaatgtaatcaattttctgagtttttacttgtagtttgtagtcttcctttttactttgtaacttcttgataattccttctttttatcaagttgcttggactccaaagctttttctttacttactaaccaattcacaaaacaaacaaacaaactaacaaacaaacacttttttagttagtgaattaagaaaaatcattacatattctaagtttacttatttgatctattatattatattatactcaaactacttatattatattatttcattctattttttaaatttgtatctataaaacaaattaaaaaataaatctactaaattatccaattgcttattcaaatttcaattgcttaattttacattcattcaattaattaattcatatcattcctttgatttttgaattctattatattttcaattacaattgcacattaaagtcatattttaacagtgtttttacggtacgtatcattttttatttatttatttattatcaattttattttccaattgacaatttttttgtaatttccaatggaacttattattaccaatcatgttttctttttcaagaatctaaagtcactccaatcatttatttcagcttgccattaattttaaatcatcttataatcagtttttgaatccaacatttttcattgtgcagtacaattaacttttcatcgcggcccaatttttattcaattgttttgttcttattgagcgttgttgaaaacagttccatctttagtttttaaacagattaaaacttacttcaaatacgaaaagaataaacacatttgaaatcaaactgatttatttatttactccataatcaaaagagtgactacattttcttataagaaaacttgattaagataataataaattccatgaaatttcatatatgaatgaaactaacattccattattacagattttcaaatagaattttacatcaatcaaataaatttttaacttattcatcaacttataaatttaaaaaatcatcatttattattcaaaattatagaatgtctacagtctcattaaatgaaaaacataaatctttaactacaaatttcttaggtttaaatactattgataaagctgaaccatccgctttaaaagattttgttgttaaacatgaaggtcataccgttattaaaagagttttaatctcaaataatggtattgctgctgtcaaagaaattagatccgttagaaaatgggcttatgaaacttttggtgatgaaagaactattcaatttgttgcaatggcaacaccagaagatttagaagcaaatgctgaatatattagaatggcagatcaatatgtcgaagttccaggtggtactaataataacaattatgctaatgttgatttaattgttgaaattgctgaaagaactaaagttgacgctgtttgggcaggttggggtcatgcatctgaaaaccctgatttaccagaaaaattagctgcttcaccaagaaaaattatctttattggtcctccaggttctgcaatgagatctttaggtgataaaatttcttcaactattgttgctcaacatgctaaagttccatgtattccttggtctggtactggtgttgataaagttattgtcgataaggaatctggtttagtttctgttgatgatgaaacctatgctaaaggttgttgtacctcaccagaagatggtcttgttaaagcaaaggaaattggtttccctgttatgattaaagcatctgaaggtggtggtggtaaaggtattagaaaagttgataatgaagaagatttccttagattatatgatcaagcagcaaatgaaattcctggttcaccaattttcatcatgaagttagctggtgctgcaagacatttagaagttcaattattagctgatcaatatggtactaatatttcactttttggtagagattgttctgttcaaagaagacatcaaaaaattattgaagaagctcctgttactattgcaaaatccgaaacttttagagaaatggaagctgcagctgttagattaggtgaattagttggttatgtttcagctggtactgttgaatatttatactcatttgctgatgataaattttatttcttagaattaaacccaagattacaagttgaacatccaactactgaaatggtttcaggtgttaatttacctgctgctcaattacaaattgctatgggtattccaatgaacagaattagtgatattagattattatatggtgttgatccacatacttcaactgagattgatttcaattttactaaaccagaaagtttacaaattcaaagaaaaccaactccaaagggtcattgtactgcttgtcgtattacttctgaagatccaagtgaaggttttaaaccatcaggtggtactttacatgaattaaatttcagatcatcttccaatgtttggggttatttctctgttgctaatcaatcatctattcattcatttgcagattcccaatttggtcatatttttgcatttggtgaaaatagacaagcttctagaaaacatatggttgttgcgttaaaggaattaagtattagaggtgactttagaacaactgttgaatatttaattaaattattagaaactccagatttctctgaaaatactattacaactggttggttagatgaattaatttctaaaaaattaactgcagaaagaccagatcaaaatatcgctgttatctgtggtgctatcactaaagcttatctacaatctgatgaatgtaagaaagaatatgtttcatccttagaaaaaggtcaagttccatcaaaggaatcattaaaaactatcttcaatgttgaatttatttatgaaggtatgaaatataaatttactgttgctaaggcaagtgaagaagattttactttattcatgaacggttctagagttttcaccaatgttaagtcattatctgatggtgggttattaattgctattggtggtaaatctcacccagtttactggaaggaagaagtttctgcaaccagattatcagttgatggtaaaacttgtttattagaagttgaaaatgatccaactcaattaagaactccatccccaggtaaattagttaaatatttagttgaagatggtgaacatattcaagcaggtcaaccatatgctgaagttgaagttatgaagatgtgtatgcctttaattgccggtgaagacggtactgttcaagttttaaaacaaccaggttctactgttaatgctggtgatattttagctattttattattagatgatccttcaaaggttaaacatgcattaccatttgataaaactttaccagactttggttatccaatggtttcaggtaccaaaccagttcataaatttgaaagattattaaaggttttaacctcaattttaagtggttttgataatcaagttgttatgaaatcaacattaactaaattaattgaaactttaagagatgaagaattaccatattctgaatggaataatcaagtttctgcacttcattcaagattaccaatgaaattagatgctcaattaaccgacttaattgaaagaactcataagagaaaggctgaattcccatcaaagcaaatcttagcattgtttgaaaaaactaaaaaggaagaaaatgttgatatcttatttgatcaagttattgctccattacattccattgctactagatatgaacatggtttatctgatcatgaatacaatgtttttgctggtttattagaagaatattacagagttgaatcattatttgctggtgacaatgttagagaagaagatgttatcttaaagcttagagatgcaaacaagaatgatttatcagttgttatcaacaccgcattatctcactcaagaattgcttcaaagaataatttaattattgaaatcttaaagaattaccaaaccgtgttaaagaactctccagctgctgttgaaatcttcaagactccattaaagaagattgttgaattagatactagagctacagctaaggcaactttaaaggcaagagaaattttaattcaatgttcaatgccatcaatcgctgaaagaactgaacaaattgaacatatcttaaagacttctgttatttctgctaaattcggtgaaactggtgttccagaacacactttaccattaatgtctgttattcatgatatcattgactctaaatacactttatttgatgttttgactccattcttatgttcaactgatccatgggttgctgctgcagccgctgaagtttatgctagaagagcttatagagcatattctgttcaaggtgttactcacgaaattccagaatcatctaaagatactccaattttaaaatggagtttccaattaccaagtttatcaacttctgcattcaacgccgttcctgaaaacttaagaggtgatgactcaatcaatagagctgtttcagtttcagatttaacttttatgattaataagaatgattctcaacctgttagaactggtgttttagttgcttccaaacatttagatgaagctgaaagtgcattatctgctggtttagaatctttagttaaagatttaaaaaatccaactgaattaatcaatgttttcaatttattcgttaactcaactgatggttatgaagatgaagctgcaattttagcaaagatgaactcaattgtttctgattacaagactgaattaaacaatgctggtgtcagaagaattacttttgttattggtgacaaatccggtacttatccaaaatacttcacttttaagactttaaaagctggtgaatcatattcagaagatcaaatgattagacatgttgaacctgcattagcttaccaattagaattaggaagattatccaactttaatattaaatctatttcaactgataacagaaacattcacgtttacgaagcatctgcaaagaattcatcaggtatagataagagatactttaccagaggtattgttagaactggttcaatcaagagtgatatcactgcatctgaatatttaacttctgaagctcatagattagtttctgatatcttagatcaacttgaaattcttgatactactaatactgatttaaatcatatctttatcaatttctcagctgttttcaatattactcctgaagacgttgaaaatgcatttgcaagtttcttagaaagatttggtagaagattatggagattaagagttactggtgcagaaatcagaattatgtgtaccgattctaagactggtgttccattcccattaagagctgttattaataatgtcagtggttatgttgtcaaatctgagctttacatcgaagaaaagaatgcacacggtgaatggattttcaaatctattggtgttccaggttctatgcatttaagaccaatttctactccttacccaactaaagaatggttacaaccaaagagacaaagagctcatcaattaggtactacttatgtttatgatttcccagaattattcaaacaagctttagcttcatcatggaaggcttatgatccatctatcaaactcaccgattctttcttctcttatgaagaattaatcctggatgattcaggtgatgctactccagttactagagaaccaggtgctaacaatattggtatggttggtttcttagttaccgcaaagaccccagaatatccaaagggtagacagtttgttattgttgcaaatgatattactttcaagatcggttcttttggtccacaagaagatgcattctttaacaaggttactgaatatgctagaaaatttggtattccaagaatttacttatctgctaactctggtgctagaattggtattgctgaagaattactgccatactacaaggttaactggaatgatccaaatgattcttccaagggtttctcttacttatacttaactcaagaagatatggacgacttagaaaagaatggtaaatcatctgctgttatcacttccaagattgttgaaagcggtgaaactagatatattattgataccattgttggtatggaagatggtttaggtgttgaatgtttgaaaggttctggtttgattgctggtgcaacttcaagagcatacaaggatatttttactattactttagttacttgtagatctgttggtattggtgcatatttagttaggttaggtgaaagagctattcaagttgaaggtcaaccaattattttaactggtgctccagctattaacaaattattaggtagagaagtttattcatcaaacttacaattaggtggtactcaaattatgtacaataatggtgtttctcatttaactgcttctgatgatttagatggtgttgagaagattgttcaatggttatcatacattccagctaagagaggtgcacctgttccaatcttagaaggtgaagataaatgggatagacctgttgatttcaaacctgttaagaatgaacaatatgatgttagatggatgattgaaggtcgtgaaactgaaaccggttttgaatatggtttatttgataagggttcattccaagaaactctctctggttgggcaaagggtgttactattggtagagctagattaggtggtattccaatgggtgtcattggtgtcgagactagaatggttgaaaacttatacccagctgatccagctaacccagattccactgaattcttagtccaagaagctggtcaagtttggtatccaaattctgcattcaagactgcacaagctattaacgattttaaccacggtgaacaattaccattaatgattttagctaactggagaggtttctctggtggtcaacgtgatatgtacaatgaagttttgaagtacggttcatttattgttgatgcattagttgatttcaaacaaccaattttcacttatattccaccaactggtgaattaagaggtggttcttgggttgttgttgatccaactattaacagtgatatgatggaaatgtatgctgatgttgaatctagagctggtgttttagaacctgctggtatggttggtatcaaatatagagaaaataaattaattgatactatgaacagattagatgatgcatgtaagatcttaagcgcaaaggttgaaaaagctgcaactgaagaagaaaaggctgaattatcaaaggaattaagtgcaagacacgctaaattattcccaatttatcaacaaatctcagttcaatttgcagacttacatgatagatctggtcgtatgttggctaagggtgttattaagaaggaattagaatgggttgaagctagaagatatttcttctggagagtcagaagaagattaaatgaagaatacttaattaagaagatgtctgaacaacttccacattcaactagattggaaaagactgcaagattaaactcattctacccatctaccattgaagttgataatgatcaagatgttgctctttggattgaacaaaaccacaagaccttagattctcaattaaagaaattaaagggtgattctgttaagcaaactttagctaaattattcaagagtgatatcaagaacaccactcaaggtttagctgaaattatgtctttattaccagctgatgaaaaagaaaagattttaaaattacttaattaagaagcatgttcaatattcttattaaattcttttgtttgtttgtttggagaatttaatagtttagttttacatatactttttattctttcttttctatcatgaggtattacccatttcttgcctatatataattgtttctctatttttattttataatttatgattttaattttaacacatgtttgtatttatttaaattcctgtaatcttgcctgtaaccaatcctatcaataatgcaagaacctgatacaaactttcccgcgtataaaaacatcaaaacataaaactttgttaacttgacgagcctcccaatgttgaaacttcaacaagcttcatattgcccttttgctctttcatctttttatgatgaggttattactctctctctgcttcttgaattgctttatttatcatcttttgaatcattgctttaatagtaatacaatttttattcaaccaataattttgtatcaaacacacaccctacacttaacaccactccgtacatagccttacactagatccaacttaataaacactaaaaacacacacaaaaagatttacacttttttacttaaaagtagaaaaatctacacaataacactcaagacatgaaatactcacttactttaacttttattctcctttgtcttctttcacttgtaaactcatttcctcttttcaataaaagggaaaaatacattattcagctcaaaaagccagattctgttgaaattttatgtgcacaagatgatagcgtcaaatcattttcacacttaagaaaagagatcaaaaaggttttttcctttggtaagtttgaaggatttatgggcgagttttcaaaggatgtcattgatcgaatctctaacaatcctttaattgaaaagattacccaagattacagcattcaagcatttgaggatgttgaaattcaagaaaatgcaccatcgcatctagtcagattatcacaagagggagcagttaatgaagacgaagaaatgaattattatttctctgacgaatatcaaggcaccggtgttactgcttatattattgatacaggtgttcatgttcaacatcctgaatttgaaggcagagcaacacttggtcctaattttagtactgatatgagaaacatagattatattggacatggaacacatgttgctggtgttatgggagcaaaaacgtacggggtagctaaacaattacaaattcattcagttaaagttcttgatagaaatggccaaggctcattatcatctgtcatttcaggcttggaatatgcagtcaaccatcaaagggaaactggcacaaaaggtattgccaatttatcattgggagcatccaagagttcagttttagatgcagccgttcaagcagcgtatgattctggattattagttgttgttgcagcaggtaataataatatggatgcgtgtagaacatcaccagcaggctcatcatatgctttaacagttggagcagtggatgataaaactgatgaaattgcacatttttcaaattggggtagttgtgttgatgtttttgcatctggtgttgatgttgtaagtttaggtaatggtagattgaataatattcaaacattaagtggtacatcaatggcgagtccaattgttgctggctatgctgcaacattgttagaaaaaggtgtttcatttgatcaaattccaaacgagattaaaaacacagcagtctgggatgcaattccttcaactagtttgagaattagatcaggaacacctaatgttattgtaaacaatggatttagtagttactcgtctaacatgtttaaatctgataatattacagaaatcgtcctctgaacagtgtgtaaatgataactttgttttttataaaaagtataaataagtagagtcaaagtgtagtaaaaatacataggagagtaaaatcatatatacaaaagtaaatatacaatttcaataaaaagagatctaaaaagattgaagaaaaaaaaagtaaaatcagtaacgttttagtgtttattaatctatagtatgagtattttagatttgttaaaaatcataaatgacatgaatgactaaatgaaataaccaaatcaccagtactagtatcataatttagacataactgagaaaatttacattccacaggaacagaaatattttgattttgattatcatttgtttgaagatttaaagcttcaggatctattgcagaatctgtaaatgatacagatgagtgatcagaagcacattttagtacttttttcaaaattgtactattgttaccactcataccatttgtaccatttttattattcgctttatcatcatcagtattttcactttcatcagagtttggtaataaaaattcagaatttgtaatttcattaattgacacaacatactttctgtataataattttaaaacattttgagatgatttatcatcagagagtgatgattttaataattcatttaattgtatattatccataaatataatacgattcaagtcttgtgttttgtttaatttaagtatcactaaataatgattaaaatctttcagaattgattgtttattttcacaatcataacaaatttgtttacctaatctatcttttggtaagtttgctctacaagacaaacataaattttgttgaactggagaagtataatgctggggaattttagcaattgaagcttgatcatgatgatattttgctaaaaatgataattgaagtaatgattgttgttcagctgttaaagttaatggatttaattttggatcaattgataaaatattaaatgagaaaagttgttcattataagctaaatcaacatcagcattttcatcttctaagggaatatcagtattctctaataaagcaaaagtatctaagacttgattttgtagaataattggatcattgacgaaattattctttactggagtcatattgttcttaaattggtaagtaccaggtaattgatttgataatttcatttctcttgaaaaagttggaggtggctgtttacttggtataaccatttgtattggagctgaagttgcagttggattaaattgttttgttgttggctgatatgttttcgaagttgatttcaaatgttctgccagtttttcaatttcttctctagttggatttggtctatgacctgcacttgcatcagcatttaatcttctctttgcttgattaaattttttttgatcacgttcaatcatacgacaacggaaacatgttttaaattgcaaatgatctggatcttcatcaagtgttctcttcctcttacaacgacggcaagtggatattttaccattaacataataataaatattggtactactcataatttagtgtgtgtattgggaattgtaccgcgagttctggaaaagttgaagtggctgtttatagtagttaaaagggcgagaattgaaacgctgaatataatattggtgattattaaaagttcctcagctgatgtgattgttcacttgtcactgcagttgttgtaggcttgctttgtagataaacaaggggaaaaagaagagaagtgtttgattgttgactttctttctgattaattgcaagagggcaaataatttttgcttgcaatttggttcttccgtacaccatttcatttatacattttctataatctacatactaagggattacgtaatgttctacatgttatatatcaagcttcactacattcccaggaaccaacattatcaaagacaacaccacttaatatacatcttctcaatgatggaattagttctccaattgcatcaacatattcttgcaaaaaatgcgcaacacatttagtcacaggtggaaatgctgagacatcgaaattgcattttttttgatgtgtaataaggtatggagctgtatggaaatcccaataatgttttaataatggatatttatcaatatttatatcttgtgaatgatgtattcttgacgataacactcttgcaacatttccaatcaaaattggtgaaatcatatctgtcatatgactcttaatttcatcataatattgatgttgtgtaatatattgatcataaagtggtaaataatcttcacaatgattacattgacatccattccataacatgttagatatcatttgttcatagcatgcaacagattgaacaaatgtcggacaaataaatgtttctaacccagttaatgatggtaacatattttcaaaaatttcctttctgtgtaaataattaccttcaagtccatgatcaacattaaaatcaaccggtggcatatgtctaattgataaatatttcaaattcttattatttgggtatttcttaaggaaatctgcaatgacgaaatcaaatgcttcagtatgattatgatctctatgtattgttctctgaattattgataatttcttgatgttgagattatgagaaattaacgtacttaaaaaatcatgcagacagttgcaaataatatcattacaaccaagaacaagttctactttatctaactttccaaaatctattttctttaaaaattgtaaaatttcataagttggatcttcaaattggtgataaaatattagtttaagattctttagttgtaacttatctgcagtaatggatgacttggtcaacttctctatgaattcagactgtccgaacacattttcaaaaatcagttcatcaaggttactaataaattttataaagaaactatcatcaacagtatctaaatggccgatcttatcagttgaaattttgagtttcttaacggaatcattaaaatattttaattcagtttttgaagtcagtcccaaacttgtcattgttgttggtaattctatattatctggtactttaacattaagtaaatctaccgatttcaaatttggacagtttttaatcagcaatgtaaataaatcaacagatactaaatcttgaagatcaacttgttgttttttatcaaataaaaatccatcgataacaatattttcaatatactcacataattgagtgttaacactcaatgattctaataatatttgttgtcggagattataaattttgtcatttaatttctctgttgctaaatgtgtctctaatacacctaataatgtataattagattcttgaaaagaatgtgaagatttaagttgagatgattttgtgatgtagatattcttgtatagatacggtagtactgacaggtaacaattatagttgcagtaaagaaggttgattttatcttgttggggcagataacttattatattagagatgatacttttcggtagtttttcaagagtgatactcattctctaatattgtatatttttagtcttatgtgtctatatatcaattgtttttgaagtaggatacttcgtaaatgattaagtgatctctaattgaagagatacaccaaaaaagcttgaagtaaaacgttcgcatgatgattttcccaacaaattgtgaaggttatttgatggaaataacggtcaattttgttgcaactttttgtataaaccgcttacactccttctttatgtcattgtctttactctttctctttcatgaatacctgttctcttactcattgaactcactgtcccagtggtaatattttttacttagtttagattgatcgatgaatcacaggcggctaaattgcctaattgggcaatatatcggatttgaaattgacagttttcaaaaattttcaccaccaaacccgatatctttccatcaaatatccactttgatcgttatcagtgaataatttgactcattgctgatatttatttcactttgacgatatcaacaacttctacttctttttttcaaattctttaagttgtgaatatatcttttcaataagaaatagaatatggaaggactgatagacaacatagcagaaacaaaatcagtattaagtatacaatcacatgttgttcatggttatgttggaaataaagcatcatcattcccattacaaatgcttaattgggaagttgatctattaaatactgttaatttgagtaatcatacaggttatggatcatttaaaggttcggcatcaacaaaatctgatttattaactatttttgaaggactgaagaaaattaacgttgaatatgatgctttattaacaggttattcatccggttatgataccttggaagctgttggtgatatttgtataggtattaaaaataatgaaaaatcagaaaaaaacgttacttggttattagatactgttatgggtgatgagggggtactctatgttgatgaaaatgttataccagtttataaaaaattattagagagtcaattagttgatattataacaccaaatcaattcgaattggaggttttactagatcataagataacttgtttggaaacattgaaaaaaggaatgaaattgtttcatgaaaaatataaggttaaacatgtcatactttcaactttatatgctgatggtttccaagaattagagggtgggcctgaaactttatattgttgtgtttcttcaatatcagtacctgatcaacttattttatacaaaatagataaaattgatggttattttacaggtgttggtgatatgttttcagccttgttattagataggatcactaaattgaatgatataataccagctaccaatcaagctttaagtgtaatgaaaaaagtattaactgttacaaaacattttagtggaaaatcaggttcaattaatgatgccaatatgaaagattgtgaactccgtgttattgaatgcaaaaacatttacaatgataatgaagaactttatcaaccaatatttattccgaaataagtgtgtgttttatcatgatattaagatacatccatcccattctatatctgtacaatgatttatagattatttaatagagacaaattaaacaataacatttacatagtttaaactgcaactgcatctccaccatagtcttcattagttattacactagttgttgatctatcaaatctggtatctacatatgaagtttcaaaatcttcattttcttcctctttctcttcttctaaatcttttaaaattgtaccattcaattttttattgaaattgagcttacttattttttccaaatcaaaatccacactataatcaaaatttcttgattcattctcatccaacaataaatcatcattatcaatatctttaacatttctttcatcttccttttcaaagattgaatttagaatcccacttcccatttgaaaattacgcgttaaatttgtttcaaaaaatgtacgtcctttagatacaatattacttttttgaatgttattggtgatgtgattaaatgtatcagacatttgcttttgtgttttagcaaattgttgtgcattaaccttcggtggattaatcgttatattcattatggaggtagattttttcagtgttgatgcaacatttgttattttattaggtgatgatggtactgacccaaaatcatctgtcataaatgtttcattagctgcaatatctgcaaatgctactttttcatatcttttctccaattgtaatagttctgcctttgcattctttaaattttcagtgatatctaaaatttccctttgtttggcagccatttggaataaaagttcatttgaatcatctttatggacttttttctcctctgttttattaggtgttggctcattggtagttgttaatttagcattaatttgttcttgtgtttccaatttgagatcttcatttaatgccgagctattagcaaattcgaattcattgttttcatcattgggattgtgattagctggtttcttgattgaaaatttgataagtccagttgattcacttattactcgttccttcacaggtttatattctgcatttgaattatttaactgattcaaagctgaatttgataagatagataaggattgttttttgttaattcttctaggtgaggtatttgcagacattctaacttatttccttactatatagaacaaaaatatgacatgtaacaaatgcagttcttacgtataaatttcttaatcattaataaattaatttggaatctaatgtaattttcattatcattactcttttaggcaaaacataaacatcattaaaatattacataagcgaaccagtgcaggtcacgtgatacaatttttagcccagttgcacgtgatctcaacattttcaaaatataaaatttatcccaaattggcaactgtggcttaaatcatgaatttattaggaaaattgcgccacaattttgatttaacgattccctctttaggtgaaaaattacacaataaacctaaactttcatcattattaattgaagcttaggcttataacataaattattaagtaacaaatgaaaactgatctccgacggttgacagttgattcaatatttttcagattttccaattttgaatttattaaaatgatttgaattcccaattttcaattattttaaataattatacttctttttgataatttaattacttatatattttattaagtagttctatattacagtagtacccctaaataataataaactcaaaatgttaactcctcacggtggtattttacaagatttaattgaaagagatttcccaaagaaggcagctcttattgaagaagctgcaactttaaaatcaatcaacttaactgatagacaattatgtgatttagaattaattttaaatggtggtttctctccattaaccggtttcaataccaaggctgactatgaatcaatttgtgataacatgagattagcttctggtcaaatctggtcaattccaattacccttgatgtatcagaagaaactgcaaaatcattctcagaaggtgaaagaattgttttaagagatccaagagatgatgctccattagcaattattactgttgcagatgtttataagccaaataagcaagaagaagcaaagaaagttttcagaggtgatccagaacatccagctatcagatacttacttgataccgcaggtgattactatattggtggtgaattagatgcaattagtttaccaaaacattacgattataccgaattcagaaaaactccagcacaattaagatcagaattccaatcaagacactggaataaagttgttgctttccaaactagaaatccaatgcacagagcacatagagaattaactgttagagctgcaaaggataaacttgcgaatcttttaattcatcctgttgttggtttaactaaaccaggtgatattgatcatcatactagagttaaggtttaccaagaaatcattaagaaatatccaaatggtatggcaagactttcattattaccattagcaatgagaatggctggtgatagagaagctgtctggcacgcaattattagaaagaattatggtgcaactcatttcattgttggtagagatcacgcaggtccaggttcaaactctaagggtgtcgatttctatggtccttatgatgctcaaactttagttgaaaaatttgcaagtgaattagaaattgaagttgtcccattcagaatggttacttacttaccagaggaagaaagatactcaccaattgatttagtcccagcaggaactaagacctgttcaatttcaggtactgaattaagaaagagattaagagatggtactgaaattccagaatggttctcatatcctgaagttgttaaaattttaagaactgcacatcctccaagaccagctcaaggttttgcattatatttatcaggtttaccattctctggtgttcatgctttaagttatgcattacaagcaactttcaatcaattccaagctggtagacatattactttaattgatgatagtaaccttaacaaagaaagtttaccatttgttgtcagtgaattagtcagatccggtgctggtgttattattgcacctgcaactgatattttagatgctgcacaatattcaactttaaagaaatctgtatctaaggccggttctttcattacagtttccattgatactaaattagatgtctgtaaggctaatgatagatcaggatttttctcaactgaagctggtgaaaaagctgtctcaatttaccaaactattgaagatgctgaactttctgctgatttaactgaacattattcaattaatgttgcaattcaaaaaattgttttatacttagaagaccaaggtttcttcaaattctaagtatttttctgtccatatagcgttattttctaataacctctctcttcattacgatacctaccccattctttatgtattttataaaaaaattcctgttttaaaaacattaattaattagttttagtggaaacccattagcattgatgatagtttgcacagccaccaagagtgaaagaaacgcggctggtgatgataatccacgtattatggcaaattttttgttcaggtttttctacgctttgtttacatttcaatttcaggattattttaagttttttttaactaaactaaggaattgttcataacacactttctaaaagaacaattacaaataaaaaagaaaagaatcagtagaagaggtatagaatagaaaaatggtagttgaaccagaattgagcagtttgcaaaatgacttacttgatattataaaaagtttaggctcatcaattttcaaaaaaaatgtgacatatcaagtaacacatttgaaaacttttatccaacaaccaaatgtaaacataatttatttaataaataaaaagaataatggtatgtaaataacattttactgtcaaatttagagaacttggatactaacattattaaatacagctatactaacaattgataaaaatgatcatgaaattttaaaatcaactcattcattcattgcaataattaaaaaaacaaaagaattaattgaaacacaaagcttaaaagaacaattattgatacttactttccctacagatccgaatgattcattatcatatggaattgaaaatataaaatcccttctagaaaatggtgtaggatcatatatcgaaattcttcaaaacagtggtgtattgaaagaattgtcccccattgtgattgataataccaaagcaaaggtaaaccaattgtcgttgtatatacaaggactgaaacaaagtatacatgcacctcaattattatcagatttacctcaaaacgtgaatgattggatcgaagctaacagaggtagagatatcgatacgatcatcgaagagatggatcaacaagaagaaaacacatcattaataaattccatgcaatcagttgttaataggtgggtcaaacatgtacaatatataacaggactgacgcatgatatactgaatggtatatctgaagaaatagtttttctaacagcaaaagaaactgcattgaaatcgctgaactctcaaataaactcaagagaagtaaacttggttctatcatttctccgagctaataaaaaatcacatgctgcaattttactgctgtccaattctaccatagatgaaaatttgaaaacaacaatttcaaataatgattttttgaaagggttaaacattgaagctcttagatctgtacaatcgatagctgatctaaaagatgtaacaaatcaaacatttggtggtttcaaaagattgaagttttctaagtattctacagacaaatttgtcattatacttaaattaattactacccaatttgatattaagttggttgaaattatcacaaaaactaatttattctcaacgagaattgatgatttcgatgagcttattcaaaatactgaagaacttctggatgtgtatgataccgatctcagaatttgtatcacgctggtaagagaaatatatagaaaacaaggtgatgttttccagccaattaaaattgactcacatctctacataattgaggttttgaaagagataagaaaggtaattatattccatgatgagtttgataaattgatcacaacattaatgtcagatattgactcgagtatcgaagaccaaattcaaacttatgaaaaaatgttcaatgaatcacaaaatgcttataatacattagttcaatgcccacagaaagagctttttgacaaaaattttgaaacattaaataaacaaaaatcggatttctaccaaaaaatttctttcatagaaaagaaaattgttgatataataaagtcaattcttttaaaagttaaagatgattattatttattgtttgaattatatcaaaaatttgagtatattttgaacaaaccacaaattagactggttactcaagaatttcaatctattttactacacgcaactgaacaggaaattaatgagctggaatatcaattcaaatcacaagtggagattaaaaagctaatcagatcaagaaatttgccaactttcacttcttctattttatggacaaagcaagtgattggagctatgtcgtctattttttcccatcttactttaattctgacaaaagattggaccaattatcctgaaggtagaaaatttgcaaccagaataaatttgcttatgactgagattgatgtgaatgtattgttaaaagaatggctagataaagttactggtcgtgtggaaaatcttttcatgcaagatgaggttatcaaaattgttgaacatgatggaatatcaaactatctggttaattactccgaatttgattttgaactatgttcagaagtagaatgtttacgttatttgaagttctccatacctagtagcgttgtaagatattctcaaaagctcaaacttttgaatgtgtatgctaaaagtttgtgtgaaattgtggatcagtatgaagatgctaaaaaggagattgtaactttaacagatttgcaaatattagtatctgctgatattgaaaaaattaaatctactctgacaaatttatcttataaaaaatggtctgatatttatcaaaatatagaagttgaaagttcagatgtgtcagctgttactgctaagaagatatcttttgtcaatcagctacaatcatttgtcgaagaattactatttaagatatcaaaattaaaacaatatgagaaacaattttatgaaaagttcaataaactcgagttttgtgattatacccatgagaatattaaaacaattattggcgaaattcaatctttagttcaagaagcaatatcacacaacttttcaagaacttccttgcttgttgattttattaactctaaaattgaaaatatattacttgaaaaactaaagttacaaatgagtttatttaaaaggcaatgggagactgatgggctcgacttttcgaacgtttcccaagttcatgatcttactattcaaaatatgtcaattttggtgagtccgccgctatcaaactcaaaggatttatttattgccaaattagatagccttatttctgttgttaaaaatcaaaggcaaattgtcagttcacctttatctagtgatacagatttagagaagttcacgatccagcgtgaagatattattttgacgtataaaggtataatttcgattattcaaaagaaatatgaacaagctatgtattatattgagaagtgggattctttgcaatttatttgggataccaagctcaatggtatgatccttgataaattcatagcatggttcaacttgttttctaaaatggatgaagctattttgatttttgatacaattgaaacttataaaatatttggtcttatcaagattaacactgaacaagctcaaatgagaatatacagtcaattcaatatttatcaaaatcgcataggagacttgttttcacaattcttgtttgatgtatcaaactctataaataatacagttgagacacatcttaacaatataaaagctagtaactttgatttaaaggatacaccacaaactgttgaaaaacttaacattctgagttatatacaacactacttatcagataacaaagccaattttgaacatattaaaaatggttatttggcgttacaaaaaatgagatttgtatttcctcttgattgcttatctattgaaacattcaacaataatttgtctgaattagaatcattgtttgcgtcagatatattttttgttaattttcactctgaaacaatttcaactattctttctgatagtattaattcattgaaaaaatctatagttgagctaagatcaaaatggtcaaaacataaacctactgaaaaaacagagttatctagtgttatgtctgttcttcaaaattttgaaaagttggctgatgatatcacacaaaaatacaaatatttaagaaatgcatgtgatattgttaatctaccatttaatgttgattttactaaagaaagagatgaaattatggaatacagtttgatgtggacagcagttttgaagttatacaatcacataaatcatattcgaatgctagaatgggaaacttttaacgtagatgaaacaatgaaatcactcggagatgttcattcagagtcggaatgcactgattatatcaactttgctccatttcaaactgtaaaaagagtgttaagctatatactaaagtctctaccatttttgaacattttaaggaaagcacaatttgacgaatcacattgggctcaaatatttgaacatactaagaagaagctacccgaagttttgtttgtcggtgatgttttggaccttgatgttcttcaaaatgaaaagtatttgaaacatgttatttctaatgccgaatctgagaaacttcttgaacaatcaatcaaagaagttgaaaagacttggttacatcaaaagtttgaagtttatgtcagtgtatcaaaagttacgcttctgtccggaggagagcatttactgggaaaaattggagatgatatcagtactttagagtcgattaaattatctcccttcttttctaaatttacaagacgtgttgcaaatatggaagagaaacttaatagtatttttaatatcttatcagtttggtatgaggcgcagactcaatgggtctatttacttggcgttttcaaagaacaagatgaattaactaggctgatgcctcttgatgtttccagatttaagaacgtatctcatgaactaaaatacattatcacaagcgctttgaaaacttcagtggtgatggacatccttaacgttcctgagattgaaataacaatcaagaaaacctgtgacattttaataactatcaagaaatcattgcttggatatttggaaaaacaaagagaaatatttcctagatttttttttataggtgacgatgatctattagaatttattggtaattccacggatattttagtaattaataaacatatccaaaagatttttcctggtattgcctccgttgtttatgatgaagctggtacatttattaaaggtatcaaatctattgaaggtgaagaattacttttatatgagccaatattattacccagaattttaggtttggttgatctgctccaaagtttacaaaataatgttcaaaatacattgttcacctttttgaaaggtatactgcaaaacattcattcaaaggcaagtttttctaaggattcgttttggaacattatcacttcatatccgaaccaagtattattattaggataccaaattcattttacaggtatgtttgaacaggtttttgagcatcaaagctacgatggcttgtccaaagaattagaaaattatattggtgcctgtattgattatatcaaaaccaacttagactatttatcaagaagaaaaattgaaaatttacttttagagcttatccacaagcgtgatatccttacatctcttgttgagaataaagctattcatgcacattcttcaaagtggttttctgaacaaaaattctattataatgaatcaagtactgataaactctgcagtgttattgtgaaacattgtaataatgtatcattttacggatttgaatatttgggaaatcctagaaaacttgcttatactcctttgttatcttctgcttttgctttattatctgaagctttagaccaaaatcttggaggtttgttgttgggtcctgcgggtactggtaaaactgaaactgtaaaatctttaggttataacttaggtcgtcttacatttgttttttgttgtgatgattcatttgatgtggaatctgttagtagaataatgattggtattagtcaggttggagcatggggatgtttcgatgaatttaacagattaaacgaacaaaccctttctggtatttcaactcaaatagaaaagatacagttagggcttgctgatatcaccaaaactattgaactgattaataaacctatgtcagtgcatcaaaactttggaatttttatcacaagtaaccctagttatgaaggtagatctattcttccggataacattcgaagcaaatttttgacttattcaatgatgatcccggactttaaaattatatccagagacttgctaataactcaaggattcggaaaaggttcacttgcatctgaaaaacttgtgggatttttcaattttttaaaccaaaactgctcacaacagaagcattatgattttagtttacgttctgtgaaatctgttatcattcattccggtaagctattaagaaaaataaagaatacagttgatgagttagccctggttaaaaaaggttgttgtgacgtagttttgccaagattgataagtcatgatgaagatactttttattcagcacttttttccttttttgggtctgtcgaagctgttacatatgatatagagttaactgatatcttaagaaaaactgcattgtctaaaggatacactgcttctaagttttggatagacaaatgtttgcaagtatacgaaattcagaagataaacccaggtttcatgcttgttggggaatcatgttctggtaaatcagtagcattctgtatgttgctagacgctatttcacaatacgaaaataaagaaaatgtttgttatagaatgaattgtaaaactcttgaaagaacagtaatatttgggaaacttgattataccacacgtgagtggaaggatggtgtgtttactcaaattatgcgtaaaataggcacaaatcacaaacaatatgaatctaagaatatatggattgtgtttgatggtgatgtggatcctctgtgggtagaaaatttgaacagtttgttagatgataacaaagttttgtctttaccaaacggtgaaacgattcatttacctgaaaatgtcagaattgtatttgaagttgaggatctagatcatgcaactcctgcgactattagtagatgtggaatcattctatttaatagagaatatttcaatatgaatgacttatctaaatctttgtctgtacaatttaaaaactccagagtgccaaaggaagatgaaatcaataaaggtttaatgttaagtgacctttcagtttcagactttaaaagtgatgttgtaaatctaatcagtgatactttagataagcagttattggatcatatttggacaatggtttcgaattatcgttcagttttaaaattaacaaagtttgaagttgtttctaacatataccgatatatgtcttctttttttaatgattttattgattttattgccaatagttcagattccaaaacagaatacggatctttagttaaaaaacaacttttctattcaattttatggtcgatggggtgtggtttacaggaagctgatcaattatctttggccagaaatttatttaatttaccgaaattttacagtttgtttgaagaaaatgaatgtgattctttaattaattctcagctagtattaccagaaggtgaattgaaatctctagaatccagcttgcctgtggtagatttgcatgcacaccaaattttaggctctggtaccatgatacctacagttgacacaatgaagtacgaaaatatgatatttgctttactgaatcaacataagcccctgttgctatgtgggccacctgggtctggtaaaaccatgatgttactatcttgtattcgtgaatcttttgactttgagttattgggcttaaatttatcaaaagaaacaacaatcaacacgattttgaaatctcttgaacaatgttgtcattataaaaaaagcaacaataatgtaactcttacacctaatgctttggggaaatggctagttttgttctgtgatgaagttaatttaccaaagattgacaaatttggaacacagattgttattcagtttttaaaacaattgtttgttgatcgtggattttggcatccagttgataaagtctgggttaccattgaaaaaattcagtttgttggtgcatgtaacccatcttctacagctggaagaatagttatgacagatagatttgtaaatcattgtacaactataatgatcgattatccatcagcattatcattaaaaagaatttactcagtttacaccaaatctattttgcgtacagttccagacttgattgggtttagtgatgcgttggctgatgctatgataagtgtatatctgaagtacaaggaactgttttctgaatccgataagccacattacatttgctcacctcgtgaattgacaagatgggttaaaggtttatatattgcattaagacctcatactagtttatcacttgaatcacttattagagtttgggtacatgaaggtttaagactattctctgacaggttaatattaccagcagaaaagcagcgtgttttcaatatacttaaagatgccgcaattgttaactttccacatattgatttaactgaagcatttaagctgccgattttattttcagattggacttcctttgaatatcaaaatgttagtgaagatgaattaaagatatttgttgccaatagatttcaaattttcaatgaagaagaatcaaacgtcaatattatcatgtatgatgatttattagatcatatcttacgtgttcacagagttttgaaaaatgaacaaggtcatatgattttagttggtcctagtggtagtggaaagactacacttgtcaaatttgtctcatggatgaatggtatagagtctgttcaacttaatgttaaaagtggctttagtttaattgactttgaaaatatattgaaagagttactgttgaaatgtatcactggaaaaaagatatgttttctgattgatgagtctacaattttggaagattcattccttgaaaaaatgaatacattattagcaaatgcagaggttcctggattgtttgaaggtgaagagtatgacgatttgattagtgtatgtttgaaagcatcgcaggataaaggtttgttattggactcgaatgatgaagtatatcaatggtttgtgcaacaaacggctaaaaacttccatgttatatttacaatgagtgatttatatggtactaaagacaaaccatttattaaatcatctgcattatttaatagatgtgttgttaattggatgggaacatggtctaatgaaactctaactcaagttacagaaagtactacaaaactaattccactcgataaatctaaattccaacctaacatagatagtgaaatagaaaccagtacaagaaatattattgtgaacctccttctccaagtttaccgctctgttaatgaattgctccaaatcgatattgcaccatgccagtttttgaaatttttgaaaacatttgccacgatgtttgtcgatagtcaaaattcttcacaagagttaaatacgcatataaacagaggtctaaatcatttgaaggaaacgtttatgagagtgaaaaagttaggtacattattaaatgaaaaagaggttcaattaaaaattgaagatgaaaaggctcgtaaattactcgataagatgattagtgatcaaaatgaatctgaaagaaaacaagatatgtctctgaaaatgcaagaactttttgtcaaacaagaaaaggctattattagcagaagagaactcgttatgaatgaattgaatgatgttgaaatagtcatagaagaggcgcagaagggtgttatgaatatcaagaaacctcatttgacagaactaagatctatgcataacccacctgacactatcaaattagtacttgaagctatttgtataatgcttggctttaaggtatatacatggagagatgttcaacaagtgattagaaaagatgattttattgccagcattattggatttaaaggtgacgagcaaataactgaagaattgattcattacatggaatcaacatatctttcgaaggaaaattttaactatgaatctgcaaatagggcaagtaaagcatgtggtccattattgatgtgggtcaaagctcagttaagattttcttcaattgttgttaaaattaatcctttgaaaaaagagttaaacgatcttgaaagtgaactggtggacacaaaagctaaagttattgcaattgaaagtttaatttcagatttacaaagtgaaattgaaaaatataaattggagtatagtgaaaatattcgtgtcaaggagaatataaggattgagatggaattcgttaaggagaagctcgagagaagtgtggctttattaaaggggttgaaaagtgaacatgatcgatgggagacaaacatttgtgaattcaagaaggaagaagagtatgttacaggtaatgttatcatacaagcagcatttctttcatttttgggaatttgtacgccaaatgaaaggctaataatgtttgaaaaatggaaggaattattgagattgaatggagttgcatttgatagtaagatagataaaaactatatgccagatatattatctgctgataatataattaaatggaaaacgatgggattatctgatgacatgcaatttattggcaatacatcaatttttacatcttcatataacgaacaattttccttcatcgtagatccatctaatcacttggttccattcttgactaaattattacaacctaaaaagctaactattactagttttcttgatcctgaatttatcaaaaaactgaaaaactgtatcaaatttggtggtcatattatcatacaagatggtgaatattatgatccaattcttaatcgattaatatcaaaggatatagaaattataggagctaatagaatgatggttaagttaggtaatgaagaaattgatttatcaccagaatttcaactatatatcacgactaaagattcaagtgcacatattccaacttttgtcatgagtagaatgaatatcttaaattatacatttaccaaaagcagtatgatcaatgaagcaatgaatttgattctacattataaagaacctgaaatggaacaaaagggattagaattaataaaacttaattcagagtataagttgaaacttagaaatcttgaaaaggagttattagatatattgagtaactctgaagatagtattttagataataatgagttattaagtaaattagaattcatcaaggaagaaacgattactcttgaagggcaaatgattgaaatcgatgaaatgatgttagtacataaaaacattagagaacaatatacttcgttgggtgaactttatgctaatatttcacaattatttgataaattctccactattaataaaatttacagcttttccaatgattatgtcaaaatgatttttattcaattactagaaaccaatattgattttgatatagctgatttgaaggtgaagtttgtccatttagtttacagtaatgcgtgtgtttcattgttatctgaagaaaagaaagtgttattaaaattattgagtaaattggttgataacgaaattgacatcaagaagatggaagagtcagatttcaatgaacacattttgaataattcattccttttactaagatccgataaaggtaatgattgtagtgttatgatcacagatattgctgaagatttaggtaaagcagttaccaaatatgcattaggttcaaatgatggtttcaaagttgctaataaattaattgcagaacataaaaacagagatggatggataattattgaaaatatacaatattctaatgaatttttacaatctataagtgatgttattgaaataatgaaattacaaaaagatgttaaattcaaattatttttaacatgtagtattgattcttcgataccaccattactaattcaatcatgtaaatcaatcattattgaaaaaccatctagtttgaaacgatgttttgttgaaattgcactaaatgaatcaaacaccttaagtttaagtcaactgaagaacaaacaaccaaaagaaattagaaaattaagttttatattagtttggttttattcactgattacaacacgtatgaagtattcaattaaaggttttgggtttaataatcaatattctattaatcaaaatgatttaaaaaatgctgagaagtttttatttaaattcattgaatcaaattataatgataaatttgaattaactgatgctatgatgaatacaattgcaaatttcatttctggtttaatatttggcggtaaagttgatgatgattcggatttaaaactacttatagaattagggttcaagatattcaggaaagaattagtctacgatgatgattctattaatcttttaatattacaaaaggaagaagataattacaaattaacaattcctaaaggttacgatattatggattatgttgattggattaatgaacttccagaaaatgagccgatggaatggttaggattgcctagtgatttccttattcaagaagaacaaactgaagttagaaaaattgaagaagttgttgcaaagttaatagctaatgtttagtttaataagtagtagtatgtctaaaaaatattacgtaatacaatatttaaaatattagttgtaaatccctcttgacatgaaggtaaaacttgtacctgaaccaagttctttttaccaaagatgggattattctggaataagaaatcaagtaatgatgagcgaaagttagagagtcaagttgaggaacaaacattacctgatgatttacaagattatttaacaactaaagaatcacaattaagtaatagagaatttaaagaattattacgtcgacagagtgcaaatgctgaagcaagtaaagaagcagagaaagcatcaactgaagatcatggtcaaaattatcttgatttagttcaaggaacgaataaagaaggtgaagaaaatgaaattaaattaccaaatgcaatttcaacaattaaggaaatgaagagaccaaaagaatataaaaattttgaatttgataaatatagacgtgaaaatgatgaaaaagagagtgttttaattaattgttctgaaattcaaaatgctttctataaatgtctaaataaacaaacaatttgggatagaattagtgcagttacatcactaaattctgatgattgtacaaaattagcagatttttttatggcttgtacagatattcaaaagaaagcatttttaatgtttgattattcaactttacaatcaattgatgaattaaaatctgcttcaaaacaaattgattatagtttctcaaaatcttttcaaagtattgaagatgtacaaaataaggaaaagtttatggaatatacaaaggaactcagacgtcaaagagaattattctttgaaaaatatggtaaataaatttaagttattaatataattattatctaatgtctatagatctaacatgtaaataaaaaattaatggatctaagttgtaatgtgtaatctaataatattgtttcaattactatactaagttttacttattaatttgatagttttaattattgctaactacaagacaaagatttttttttgaaatattattaaagttataactaattaaaaaatgttatataaaattcagagtaaattaattaaaaaagagtaaattattaaatattaatatattaacaaatataagcaaaaacaaattgttaataaaaaaattaaaaatgttttttttttattattttttttatatcaaattgaaaattatcttctttaatttgatttttcatgttgagttgaaactctcttcattgcagcaacgaaatcttcaaatgatctgttatcttccttttcttttaatggtttaccattcatgaatctgtcgaatttttctgattcagacatcatgtagtaagcaccacctaaaacacagaagacaccgaatgaccaaatccagactctaacgacagtaacaatgtcgttccagttttgtgaccaccaaccgaataaagtgaaacaagttgcaataatatcaacaattaaaacagcaccagataattgccatgatggaattgatgaccagaatggaccagcagctctagtaataaaaattaaccagttttcagttaaagaaatttctaagaaaataacaccatcaattgaaccaaagttttgaataataccaccctttggtaagaacatagtagttaaagtaatccaagtaccaatagctaaaataatacctaaaataattgacataccccataatcttggtaagttccatttaactggttttggagcaaatggagcattatcataagcaattgctaaagtagcaacatcagcgaaaatagcaatgaaaacaactaaatcaatgttaagagattcatctaagatagcaatccataaaccaaggaataattctaaatgtaatgataaagcaattctgtaaacaacataagagtacattctgtggaaaatttgtcttgaagtcttaagagcatcaataatagcagataaaccaggagcaaggaaaacaatatcagcagcagatctagcagcatcggaagcaccttcgacggcaataccggtatcagccttctttaaagatggggcatcattgacaccatcaccagtcatagcaaccaaataacctctttcttgtaaaatttcaacgacattatatttatgttgtgggaaaacttcagcaaaaccatcagcattttcaacgaaatcatataattcagaacctgccatatcaccaccaccacctaaacctaatctttcagcatcgaaaatttgatcacctaaacctaattgtctacaagtttccttagcaataccaacagcatcaccagttaacatcttaactcttaaacctaatcttcttgcttctgcaacagtttgagcagtatcatctcttggaggatccatacatggcataatacctaaaatttcccaatgaccttcacctctctttcttgcaacacctaatgatctgaaacctctactagcaaattcttcaactttattttgataagcttctaagatatcttctggaattggatgatcttcagcaacagtctttaaaacgaataatggagcacctttaacacaaataattttttcaccttctggggattcaacaatagcagtaacttttttggaaacaggatcgaatggttggaattcaagagtcttgtattctttcattgcagctctagcctttggataaccaattaaagattttaagaaagccttatcaattgcatctaaacccttcttctttcttgaagcagctaaacaagcagttaacattaaatcatcagcttcaacaccagcaacagtatatggttcgtgtaaagataacttgtttttagttaaagtaccagttttatcagaacataaaatttcaacaccagctaaagattcaattgcagataatttttgaacaattgcttgtttctttgctaaatatgcagcaccaacagccatagtagtagtaacaacagctggtaaaccaactgggacaccaacaatggtaattgctaaagagtatcttaagattctaacaattggatcagatctgtagaaacatgcacaccaaactaataataaagttaagataacgaaaaccaataataaagtaccaataccatttaaaacttcagtgaaatgaccttgaccaccggaagctttgttaactaaagcagcagctctaccaacgaaagtgttatcaccagtagcagtaacaatcatgaaaccttcacctctcttaacagttgaagatgagaaagttggatcattacatctcttatcaacagctaaagattcaccagtaattgcagattgatcaatttgaataaaacaatcttcagtaactaatttaccatcagcaggaataacaacaccatcttctaattttaaaatatcaccaggaacgacttcattagcagcaacatcaaccagttgaccatctcttaagacagttgcagtattagctaaagttttctttaattcatcgacaatagaaccagcttgatattcttgaatgaaaccaacagctgcatttaacattaataaaccacaaataacaccgaaatcgacccaatcttctaaaccacaggctaagatagcagcagcttccataacgaattgaattggaccaataaagaacatacagaacttaagaactaaattttcttgttcttcagccatttgatttaaaccaaacttcttctttctcttagcaacttcagcagaagttaaaccaacagatggttcagtatgtaaatattcatctgggacttctttataagatgatgaatgatgttcttcttcatcttcatcatcatcatcatcagcatcgatgttatggttagattgtaattccataactaattcatcgatatcttcatcatcttcttcatcatcagcaggtggagcgacgactggagctttttcagcaattggttcgtgaacttctttttcagacattttgaaatagtacttttatttttaagtagataaaaaatttattttattttagttgttaaaaaaattgggggaacgagtgaaataattgaattaataagatttttttattttgattaaaaaatataattaattgaatgtatagagtttttttttggttgttaaacactaaataaaataattgggtatccgttactttgataaaagagtactgataaatgaaagaaagcaaaaaaaaggggattttagaaaagaaagaagaaagagaaggagaagtaaatacttaaattaaataacagaaagaaaagagcataagttgaccattttaaaaaaaaaacaggaacaggcaactaatttaaaaaaaccatggaaagtagtacagaatactggaatatgcccgaaaagggcagaaagtcgcagaaaagagtgaatttattactattgccctatatcgcgcttaccgtaataggcaaaaacataacaaaaacagtgaaaatttatggaaatatttgaattatagtatgaaaacagtattaatttccgcactattttaataatattttgataaatttcattggctaataatattactgatattattgatattacatcatattataataatcataatctattttccacggagtatttcccttatccgctttaatatccgctactattctatacttataccgattaattactattggttatactatactaataatatactaatacaatacaataatcggtgttacaattgggtcttgtgactgataacattaataagttaattaataactaatacactaaacaataacttcctattggacttcaattactattgtaactattatagtattaatactatattccctcacacacctcactgtaatctttctttcattggtgattattattttcatctttactattatttttatttttatttttatttttatttttgttctgttatgtacttcttatttccgccacagtcgcgtctgtttgtcaatttgtatttctattatgtatgctctgtatcaccctataaactccttattctgttcacaatactaacagaaaatactcttaaaagtaatagtaatataatagtaataattaacacttccagtaccatattctgtaattgaaaacagtattttacactttttaataaaatgtcttttattaccatacattaaattttgaaaatctataggtaaaaactcttattataataattaactaattcaattacatttaaaactaactatattactacaaaaactattctaatactataccacagtccttctaatacaattttaatctttttataccatcaattcctattagtaaacacctattttaatacctttaattaatcaagttttatcaaacacaacatttctcatgtcatactcgaaacatgttttttttacataaccctaaattaaatttaatcgtagatttttataatcacaattaatattgataactaagtaaacccctttttcattttctatatacaataatgccaacaattattgataatatacttgaattacctgatataataggaaatattaataatgataataaacaaattattaatatttcattaattttgaaaaatttatcaaataatttaacttgttcaatttgtcaagatttaccaactcaaccttatttattaccaaattgtggtcatactttctgttattcttgtattaaatattggtttcattataatccttcttgtccaatttgtcgttcaattattggtgatgttaaaccggttttcaatcatacacttaaattaataattgattcaattataaatgatttgaaaacttcattgattaattataatgaatcattatcatcaaaatttgattctttatataatacttggtataatgaaaaaaatgaagaatttattactgataaaaaaaataatttcccatggttaactaaattatcagaaaattggggtagagcagttgttgatcaagaagatggtgtacctcgttgttctgcttgtcattgggaattaattgatggtagatgtgaaaattgtggtagatctgtagttggttggcaatcaagaaatgatggtgatgatttagatgttgatgaagatgatgttgaaagtgaagatgaagatgaagatgataatcatagagatgaaaatttaatttcaagatcacattatactttagcttctgatgatgatttagatgatgattataatgattatgataatggattacatgatatgtccggtcgtatagtactcaatgaagctgaagaggatgatgatgtagaaattgatgaaaatgaagatgatgatggtgatgatgttaatgaagaatctttcgttgatgctagatttaatgatgattatgaaagtgatgatgggtttatagtagatgatgatgaaatggaagaagatcaaatcgataatgatattgatgaaaatgatgatatggatgatatagttgatgaatcaggtttcttatctggtgatgaagacatagttaaatcaagacgaaatatagtgaatttatctgatgatgaaccaacaattgtatctgaagatgatacaaatgatctagtagtgaataaaagaaacagacaatcattatttgtaaatgatgattcagatgattcagatattgatcaagatattgatcaagatagtgacgatgacctgaaaatttcaaaatcttactctagaaagaaaatcatatcagatgatgatgaagacgaagatgaagatgaaaatgattcaactacttttcaacctaaaaagcataaacataagcataaacataaacacaaacatcatcataaacactccaagaaacggagaaactaattactatataattctttgctaaataaaccattttacaagtaaaaacattcttttctctatacaggtaataatatgataataatctgcctatctaaaatctataaaaaatttataattgtataattcaatcattcaacttctagtaccaaataaaatttcagtatcttcatcaatccatttaacgagatatttaaaattatctcctgctgtatcgataacttcttcgcatttttcttcattcttatttttaagctcatacactgaaaggtcataatacgacatcatcttaggtattaattgttgtaaaaataaatcttcttcactactattttcaacaatttcatcaacagttttatcttcaacatttttttcaatattatctttgtttttatcttccaagctcttagttcccatttgggttagaatttcacgatttttaatacctgcagttttcaaattgaaccagaaaaattcatcaataataatattcttctcacctttaagccattctaatatcgtaattaattctttaaactgttttgtactccaacaatatttaataaacattgataaaaatctcataatattttgatcaccaacaattttaacattatatttctcaaataaatctaacaccattactgctttatcatataatttagatttgacacaaaatttaaataattcaattaaatctctacaatcgaccattttagagttttcaataaaatcaatttgttcactgaaaagttcaagtgccttttttctatttctcctcttgtgatacatttctaaattcagtctaacactcctaactcgatgtctagaaagtctattcatatttttaacaatttcaaataatctatcaatctctgttgggtcattagtaagtctaatggccttacgtaatatttcactatcaggtaaaataccagaatataatcttgattcaatatttcttaaatatggatcagttggtaatggttttaattcagaatttatattatcgtatttgactgatgcataatgtcgtctttcatctgtatcaacattaactggtatttttttaacaactaacaaattcgataaaaatccaaattgatgatactttgatttacttaatgcttttcttaattttctatgaattccataacctaaatgtggatgtttattaatcatacctctccaataaattaaaacatgagtccaatgaattttaaaatttgattcttcttttaactttttcaatagttggaataccatttcaggattttcaaatttctcaaaatgtctaagtaatgaaaagatagttatttcaaaatttttcttattattaatcttcataaatgtctctagtgctaatccaaattctccgtgtttcaagtgtaaatatgttaaattgtttagtaaactggatacttcattttcttcttttgcatgttgaacatattgagttaataattcagacttcataaattcatcatatgatttccttgttttggatacttgattacataccctaccaaatttaactacaaacttttcagttaaacctcttttttctaatgactgttcaatccaagcaatgtcttccgtcaaattgcattctaccaacaaattatacatgaatgaatcaatagatggattagtttgatgatttcttgatatccaaagtttgtaagatgacaaacataagtttggatttttcgtcttattgtatagattggaaatgaaaatgtttaataaataattgggtaattctttttcagtcattacactttgatggaaaatttgtattgccatatgaatattttctgtctttaaataaacttgaatagcattagataaaacatttgcagatgccgttatttttctatgttgtaagatttgaaataattgatcaaataatttataatcaaacgcagcaaatgaaacttgaagcataacatccaacattttatcattcacattatcatagtttatttccttttgttgaatttttaaaagtttatatgcataccatttaaatggcaagaattgaacaaataaatgtttaaattcattatgggttagatagtcccctttagattcatttctttgaactttaagtattattgatcttatttgattttcatctgctagtttattaagttcttcacaacttttatattcagtctttcttttcaaaagttttatattcttcaatttacgttctgttagtttttgaaatgatttaaaagatacagaatttaatgtgtttatactctgtaaattcctttctgtacaattgagaattttgatcgttttcattgctttatctggtatttctgaacttgctttcatttcattatcagctattatatcagaattcgttatattggtattaaatcgcacaccaacagtaaatctatgggttaaattaatcagattggtaaccataatggctcgtatcttgggtctgtgattgtaaatcattatattagatttttttcgattggttgatttaagttcataaaataaaaaaacaaaatgggtatttataattgaaaagtgtatatgtacaagtttatatttgaaagtctaagagcgaccgtttggtagttgcaatttaatggtgacttatcaaagctatttatcgtagacaacttgaaattttcagattcatgatgtcgaacaattttgaaacaattatgaattcatacgttttttttgtgaaattttcactcgctcttccttttaagatatctaatgcgctttgtatggtaaaagtataattactgtgcagtttgtgtggagaatcatgtcgaattgaaccacccgcatttcaaatcaatcaataagaggttggttgacatgcatgagcaacaataaggtggcactcatcttatatacttggaccaaattaaatagacaggtatcattcttatattataaaacgttttttttaatattttagtattgctacaaaatcaattgaaagctggatgatatcaattataatttagcaccgagattaatatgaacagatttagtttgttggaaagctttaagaccttcatcacctaattctctaccattaccactcattttataaccaccgaatggcattctaaagtcagcagcacaagtgtagttaacgaaaacttgaccactttccacttttctgatatagttttgtgatctaacaatatctttagtaaaaagatatgccgctaaaccataatctgaatcattacttaattcaattgctttttcatcactcttaaatttagaaacaacaataacaggaccgaaaatttcttccttaacaacagtcatatcttgattacaatctgcaataatagttggttcaatataataacctttcttctccgtttgagatggaataccaccaccagtgatgattctaccaccttcctttttagcagattcaatgtatcccaagactctttcttgctgagctttacaaacagctggaccaacattaacaccagctacaaattgtgcaccttgaacataagcttcttcaacatgatctttgaacattgttaagaatttatcataaacactttcttgaacataaactcttgaacttgcagtacaaatttcacctttattaaataaaacaccaaatgcagcccatttagcagcttgttctaaatcagcatcttcaaagacaactaatggagatttaccaccacattctaaagtacaatactttaagtttgattttgctgcactttcttgaattaatttaccaacattagttgaacctgtgaatgaaattttttgaactttcatatgttcacttaatctaacacctgcaacagaacctaaaccacaagtaacattaacaacacccgctggtaaatcagcttcttggaaaatcttacacatgaacaaagcacttaatggagttatttctgaagttttaacaacaatagtattaccagctgctaaacatggagcaactttccaagcaaatgtactcattgggaaattccatgcaataattgcagcacatacaccgtaaggttcagaaattgtatatgtaaatttagaagtttcagtttcaattgttttaccatcttgagcatgaattgccttacctgcataatatttgaaaacatcagcagaatgtaaaacatcaaaaatcgcattagtttctcttggtttaccactttcaattgcttctaaatctgctaattgtgcagaatatttaacgattaaatctgcaattttatataaaaattcagatttagcctttcctgataatcctgaccatctattcttaaatgcatcttctgcacaatcaactgctttatcaatatcttcattacctgcaactgaaactgaacaaatggtttcacctaaacctggatcttcaacttcaatagttgaaccatcaattgattcaacgaattcattattaataaataaaccagttggttgttgatatttagttccattaggaattttaatttctacttcttttgctaatgacattatttgtttgtttatttatatatatatatatttgttttttgtttaatgaagaaagaaaacttggttacttcagaaaaaactttgggacatactgccttccttttatactcttatcttctgtcaaacttaaccccgtaatgttatctccaaaataatttacaaattgtctttagcgataattttcagtatctaaattaccggattgggaaggtctaggcgtaaaagattattagccaacattaataatttcagggtcctgaatttttcaataatataactattacattagagtagacatgaatgaattattttgaagcctatatatatgaaaactagattgtattatacacgtaacttaggttgatgttctatcagttaaaccttcatatgcttctccgagaaaaatttgaaaattatcaataatttttctatgtgactcaatctgttcaagtcctaaacttcgtaaaaacttatcaaataatcctacaagtacaatcttagtacgttgaataattgatgcaattcttattttctctgttgtaattattaaattattacctttcaatgatgaataatcaattattattgatagaacattatctaatttagcaactaatcgtaataataatatccaatctgtaaatgtatttaagtcatatttaacaatgtaatcaatcaaatctcctattattgtaatataatatgaaacaaatgatgaactatcaatattatttggtaattcaagatttttaacatttgattcatcattggttattaagatcattgatggtggttttatcgagttgtttaaaatttctttcatatctgcaaattcatttccaaacattgtttcaattgatgtatcaacaattatatttgcatgataaattgttggtatgcctttaaattgagacaatgcataccaaataaattcaattatatcatctatttgtgtgattaatttattgaattcaagtcctacattctcctcatcttccctcgaagataaatatttaacaaatcctctccttatagtcataactttattatcaatataatcatttaatttttgaatttgtgaatcatttaaatttttaatatttagcccatcttttaatattatcggtataggttctgatgataaaagtgtggaattttcaccaaatggattaagtgaatcaattggtgccctaattggatcacaaaaatccatcatcggagtgatataattagaatctttaggtattgaactattcagtacattttctggtaattcatcttcaccttcactattttcaggtaatgaatcagaatgttcaaattgtttaaaattattaattggaatcttctctttattcgatattattgtatcaatatccatttcatcgtcatcttcctcgtcatcaagatctaatagtgcacctaattcagtagggattttggttgtaggagtttccacttccttttgcggtagtttaggagagtcgggtatattgaattgatccatttctgtatgtgttgatatacttttcaagtacttcaccaaaaagaacaggccattcattactcccgtctaaggcagattttgtcaggccccagaaaaacatgccaaaaatatgaccttttcaatagggattacgtaaacattttcatgttgattttaagttataattcattaattgacggacactaatccaataatacacagtattaaaaaagcagtaaaaaaatattaggttataaatgaaattttattatttaacaagatttgcaaatccttcccttgaaactaatcttgtgaatgttttcaatccaccattttgttcaacacaccaagcatcttcaacagcaaatgctaaagattcaataaattctatacctaattcacgtgagattaggaataattctttacttataaattccttttgttgtaaagtttgagctgcacaagcagcaataaatagtggtaaaattgtaaaacattttggtatatgatgtttattatttggatttataataatacttgaatataattgataactcgtaataaattgatctaaataaaatccaacaattggacttgaagcactaacagagatatcactaattgtcaggtataaaatttctagtgacatatgagcacattttgcaaattctaataatgaagaattttcatgtgattgaatttcagatgtttgaattgttgtccaaataattgaaatatcattcttcaattgttttaaattatcatttaacatttgtgattcaattgaattacgagttcttaatatccaaattgatttagctaaattttgtaaaatatttataattgcagtattaataacattatcaagccattccatatcactttgtgaatcatcatcacttggagatgaattgctattagtgtaataaccatttagtccagagacggtggaattttgtaaattattaataatcgaattggtcttagagttagcattattattattgatatttgtatcaatcatactatcgagcatttccttattatatatttggaatactttagaaggtggcatagatgaaactaaattatcaaagtttgcgaaatatattgatagtggatatgtaaataaaaattcataaaatagagctttatcataattttgtgaattttcagatacagtgtcaatagatttcgtagattgtgaagatgccattattaaattagacacacaactttcagataccaaacccatcacctgatcagcagcacataaatgtttcattgcaaaaattgaccagggttcaacttgattattggttgaattattaatcgattgattaaattgatcctttgattgattcatatctgtattttcagttattatttgaattgcattattataatgtttcaaagaggcattgttatatttatcagtatgagtatttttagctaataatgaacaacctcttgcaaaataaatctcacgaaatgcagctaatattggtgatttaacattaacagttggaattgaaactttaggtgtataattcattaaagcatcatagaatgaattatcagataattctggtgtgaaatcagataataatttatcatctaaatttgggtatatagaattgaacaattgagaaattgaattgaattcagcaaatgaatcactaacatgagatgaatgttgtaaatttgatgaaattttagtttgcttctgttttaaagttgaagaataattataattgtaatttgagtgatcaaatttaataactgtatcgatatcatcaggaattatagttttcaaaggtaatggtcttatatgattatagtttttcaattcaataactgagcaaagagtagttggaacatctgagacatattgatggagatcattaacagtttcaataggttcatcacttatttgaattttagatttaatttcctttttcttagagatagtatcagtattattattattattattatcattattactaataattttttcaacatttgagttaaattttaaacttgtattaaattgatcttgagatgaaggtaaaatttggaaatttttaggcattgtttcacttggattagttggccaaacacaacaaaggaaattacgtgaacaacctgaacatacgggaccattttcatcacatttcttctttcttttcctacatgtaaaacaaccagttttagttctaacttttggtaaacgtacttgtttaatagaagaagactttagtttaggtctctcccttgtatccttggcaatagaaacagacattgtaaaatagataagattgttatgggccactaaatccgaaagaggaagtaaatcaggataagaacaaaaaaaaaatcagactaaaacccaaaaagatcaaaatagattaaaccagcggataaatctgattatcctccacagtaactgtcacagtaaaattaaaatttctcaaattcccaaaattcaattaaatcatgctagaaaaagtaaaaaagaaatttattaaaatcgaatacttaccctgtctctgctcccaattaggaaagtttaggcgatatataggaactgtatgaaaatagtatttttcattacagctaggcgaactttttcaactgataagaccttcctaatatggtcgcttatcagtagattcaatgtacacatcggacactgtaaccgttttttcagaatttaatataaatagatcctctaagaacctctacaaaactgtcaatcattttttggatctaaactccgttttctctttgaaaaaatcatttttcttattatttcccttctttttaaagagaacaatcaatttcaaatcaacaatgtccactttagatattaaagcaccaaaagatatcgaatctttatacactttcactgatgatgcaagtaatcctgaacttttcgaatcttggaaaccaaaaattcaagcttacagagatgaacttgacaaaaatactttaaaagaatatagagttccagaatctgatatcccatctgatattgatactaaaatttttaatactgttgagtttttatcaaaatcaactgctttaactgaaaaggaaaaggaaattacttcaatgtctgcaactgaattagctgataaaattgcaaaatctgaattatcatcagttgaagttttaaaagcttttgctcatagagcagttattttacaacaatgtactaattttgcaatggatttctttattcatgaaggtttaaagagagctgaagaattagatgattatttagctaagaatggtaaaactgttggtccattacatggtttaccaatctctttaaaggaacaaattgggtatgctggtaaaattactaatggtggttgggttagttatttagattacatccctgaagaaaatgcaacaactattaaagttttacttaatttaggtgcaactttttatgttcgtactaatcaacctcaatctttaatgcatttagattcaaataataatattactggtagaagtagaaatccttataattctttattaactccaggtggttcatcaggtggtgaaggtgcttgtgttgcaggtaaaggttcatgtcttggtgttggtactgatattggtggttcaattagagctcctgctgcattctctggttgttggggtttaagaccaacttcaagaagaatttcttgttggggtggtgtatcaagtggtagaggtcaagaatcagttgttgcagttgcaggtccacttgcaaattcaattgatgatattgaattatttatgaaatcttatattaatgaaggtaaaccttgggatgatgatcaattatgtattcctgttttatggagagatgttccaaaaccaaatgcaaaggatgtaactgttgcaattttatatgatgatggtttagttaaacctcatccaccaattgaacgtggtttaaaatttgttgaatcaaaattaaaggatgcaggtgttaatgttattaaatttgaaccttttgaaattgaagaagcttatgatgttgttcataaaatgtatagttgtgatggtaattatatgcaaaaggaaatgattaaaaaaacaggtgaacctttattaccaatgactaaatgggctttatcatttggtgatggtgataaaatgtatactgcagctgaaaatagagatttaaattatagaagagatgctttaagaaagaaatataatgattattttgttaaaaataaagttgattatataatttctccaacttatgttggtgttgcatcagttacaattcaagatggtattgcaggtgcttattattggggttacacatctttatttaatatattagatttaccaactttagtctttccaactggtttgagtcaagatccaaaagttgatgttaaggatgaatcttatgtcccaagaaataaacttgataaaattgaacaagataaatatgttgctgaattacttgaaggtgcaccaatttgtttccaattaactgctagaagatatttcgatgaagaaacagttgctttcggtaaagtcattgatgatatcttaaagaattaggtaaattcttaaattattacattcacccttattttaattattattaatagatcattattttataaactttttttttaaaaaaacataaactgagtaaacattattctaaaactggtaaaaattgaccaacaattaacattggtatatcaaaaacatctctcttaattgtccaaacgcaacaacatttaagataattattatcttcagccttacgtaaattacaatctgttaaataagttgcatttaaatcaccaaaagcaaagttactaaaacttctaaaataattaattgtactttcatcatccattaattcaacaataaatgtacgtttactcaataaactcatttttgaataacctgtcataacagcaaattcattagttaatgcaacaatttcaccagttcttctccaaataattgtaggtgatggagaaactgaaattaaattctcatattcaagtaatgtcctttggaaactcctttcagtaaagatcaaatcattttcatataaatttttagttgcactaataaaacttggtctatatttcgccatacatttagcaatttctaataattgtaatttattaaaacgttttttcaaatatgcaattaatgcatgatatgcctttggatattgatatgctttaacaatatttgttaaataaatatcatcaggttgcttgacaacatgtctcataattaatggtgatgtgtaatcatcatcttgttgtaaatccattggtaattcttttgcagtattaatcatatttgaatgatctgcattataaacatatgagtttggagttgtgttattttcataagatgaaatcattgaaccatcttcaagatttattataatataaggccttgtatcttcaccatcatctaaattcatttggagattattcactgtattattagtactattattattactattatcaccatacatattcatattaaaatttgtacccatattcatattcatattcacatttacattaggattcatattaacattgatattcatatcaaataaattattcattatttttttattatttggatttaaattcaatatgtcagtcaattgaacatattcatcatttgcaactgcactttcaaaatttttaactgaactgttcgatgattcatgtgaattaaatttagaatcattatttgatcttgttttatttaatggtatactattatggattgaattacgttcaatggtattagttttggttgaattagttacactaaattctaatggtgagccaggagtctcaggatctctatctgaatccattggtggcattattgaacttaatcggattggaccattatcaaatttcttatttgtactggaatcaatatcattattatcatcaatacgattatcttgtatgatattattattattattattattatttttaactgtgtttgttatatcgtctgataattctttttgaacattaattggttttaagctagttggtaatttttcattcaataattttgaatttgataaacttggcaatccattaaaattactaattgaagttgatccaatatttggtgaaaatgaaaatttattattagcattagcaacagcatcaaattgtggagttcgtatttcttgtaatccatggaaaatattttgattctttaaatcagtaaacgaaggtaattgtaaatcattaattccataattagttgatgatgatgatggtaaattatttaattgcgtaagatttaatccacttaatgaaacatttgctaaattaagtaatggttgatgatttgttgttggtgtattactatttgtagtacttgatattggatttgtatttgataatggcgggagtaagttcaatgaatttggaatagcgactcccagtccatgtagtgaagtatgctcattagtattaatagtatcatttatcccatcagttttcacttttttagtctttacttcattctttacttcattctttacctttggaggtcgtcctcttttacgaccagttgttgattttgttgatgttgttgaagtccttgatacatttgatgattgatttgaaagtttatttgaaattggtttgtccgaatttttataaattggtttaacctccgggttacttgttgaggctgtaaccgttgatgattgtgaatcaccacctatcgtactactatctctaccaatgaatttgttattatttgtgatatttaaaccagttgaaaaatcatttataacatcgaattcatccttttcactaccactactacttgaacttttattactactactagtatcatcattatttgaagtaataataccattattatccttattcacaccatttttattatttttattatttctgttttttgattttgatgaaagtttacgttttcgtactgcatcaatacaagtatcagcaaatcctctctttgtacaatttttacaaggtctctcagaatcacattgtaaatgttttgaatgacaaaatgtacaagctacccttgtaggctttctatttaatttaacttccaatggaagtttcctagtcattgattattattgatttgtgttattgaatattcgctatgagatataacttatagttattgaataaatttatgtctggttcaagctttaactctgtcatgtgtaccctgcacataaagataaaaaaataaaaattgtgggggatgggttattcccgggaacagcgagtgattcgcaaaaaaaataaaaaaaatgaaaaaatgccaaaatcctgggatttagtgggagaaagagggttctcatgggcggaaatgatgactcaatgggctccgagattctacgctcactggggaaaaactaatacattccgtttatctacgggctttccgtaccaaagtaacggtttcctacgatatacgggaggtaaattccttacataatattgtaaagactactataacgattttaaggtgaaaattattggtttatattaaatcaatgtatcttatacaaaatatactatcatgaaataatctaaactaattaattaaatcaactacacaattaagcggatttgaaaacttctaagaatttagagttatctgcagccttggtaactggagcctttgctgaacctaatttcttttcagagaaagcctttgcatatgggtttaatctgtataagatttgtttgttctttaatgggttcttctttaatgaagaagtcttcttggtttgtgcaggacctgcagcctttaagacagccttaacttcatcagagttaataatcttagtaatatcagtgttagaaacaatgtttgatgggattgaagtgtaaacggaatctaaagctgcgaaagctgattcggtccagataacaaatctacctaaatgagcacctggtgctaattgtaataaacctaaagatttaacattagcagtttcaacacctggaatgtttctgaatgctttaactaaaccattatcttgagcatagacaactaatggacctcttctttgagtaaatcttctacctctcatcttacccttaccagctctcatcttctttgatttaataaccttaataacatccttgtgagcatttaatgcctttaatgcagcaactgcttccttggttttttgaacattttgtaaatcatcagagacaactaatggaatttcagaaatttgttcaattctgtgacctcttgcaagaactaatgattgaacagcagttgcagcaatagcagatgcagttgcatatttcttttcattatggttaaccttgatgtgccatcttctccagattttagttggagcaaacattctaccacctctacacatgttaccaaaagcagcttgacctgatctgtgagtaccaccaccaccaactcttggaattctggcaacagctctaccagtaccccatgattcagcggagtgttgcatacctgcattttgtgcaacagcatatgcttgtctcttgttcttgttaatcttagtgaaaacagtgtgaacaacatctggtctaattggtgctttaaaaacagctgggattgggagtgcagttgaggtggtttcacctgaaacagcaataacagaaacttgtggtcttgcggacattttgtaaatgtgtattagttacttaaaggaaagaaaatttaaaagaactgaaaaattgaaaaaggtgaaaaaagatgaaaaatctccataataaagcaaatgaacgaataattaaagagcttagctggaaggagacgaggaaactgaaaaatttttcattcaatgaaaattatggaaatttatgtgagggtttctctgcgtcttttttttttaagttgttgttgtgcgggtaattaggagttacgtaatcctcagttaaataaaataaatttttcaaccactaagtaaatcaaaatatttcagtaaagtagtgaaattagggtacatcagagaagcttaacttttgacaaacacccctacagacacccacatatacacaatgtctttcactaactgggcagacgcaggtactgaacttcctgcacctcaagtaatcgataataatgatggtacaaaaactgttatctcatatagatataatgatcaaaagaagaaaattaaagtaactcaaaaaattaaattaattgaaacaactgaaactgttaatccattagttgcaaagagaatgaaatggtcacgttttggtcttgaaaaagataataaaaatattggtccagctacaacaacaactaaaattttagaacctgtaactttaattttaagtacaacttggaaggcagacgaagaaaaggaacaacaattagcaaagaagaatactgctagaagtgttatgaaatgtagattttgtggtaattcaggtcattattctgctaaatgtccttataaagatactttcggtgttgatggtttacctaaatctgaagtacctgctgcaagtgataaaccatcaggttttggtgcaaaatatgttccttcaggtttaagagctggtgcaaatggtttgaaacctgttaatgaagttcctgcccttagatttactaacttaaattcaaatgttgatactcaaactctacaacaacttgttagtaaatttggtccttatgaaagagtttcagttcttaaaaatagagatactggtgaaccaatgggtgttgcattcgttaatatgttgactaaaaaggatgctgaagctgttatggaaggtttgaatggtaagggtctctttaatatgattatctctgttgaatgggctaaaccaaagaaataatagtgtttattccccccctctgtatcttataatctttactttatatactatactatgctatactacaatatattatattatatataccttatcatcatacaccttacgatatcctattgtacacttataatagtctctctaatcaggtcaccccggttttttaaatttatattttcagatggcttattattttaatttatcaggtgtgcatcaggttctactttttctaccctttcagagcctccacttctttctttttctttcttgttttttacaattgtctttttattacagtatattccatccagaaaatcatgacagaagccaaagtaccagaagaagttaaggaattgattaaaattgatccatatttagaaccattcacagaggaattagctgatagatgctatcttgctgataggtggcttgattcatttaatgaacacgagggcggtttactgaaatttgcagattcttatcaatctatgggtttacatcttaataatgataactcaataacttataaagaatatgcaccaaatgcaactgctgcttgtttaattggagattttaatgattggaaacatgatgaatatattatgtcaaaatcttcaactggtaaattttcaattactttaccaccaaaatctaatggtgaaccattaattaatcacgattcaagagttaaaatattcttaactttaccaaatggtgaaaaagttgcaagattaccagcttatattcatagagcaactcaaccccctgctgaatataacaacccttcttatgaagctagattttggaatccaactgataaatacaaatttaaaaataagagacctaatttaccacattctttaaaaatttatgaagctcatgtaggtatatctacccctgaacctaaaattggtacttataatgaatttactgataatgttttgccaattattaaagatttaggttacaacacaattcaattaatgtcaattatggaacatgcttattatgcttcttttggttatcagattacatcattttttgcagtttcttcaagatttggtaccccagaggatttgaaacgtttaatcgatactgctcatggtttaggtttaagagttttgctcgatatggttcattctcatgcttctaaaaatgttgatgatggtttaaatatgtttgatggtactgattattgttatttccattcaggtggtaagggtgttcatgatcagtgggattcaagattatttaattatggcaaatatgaaactttaagatttttgttgagtaatttgaaatactatcttgatgaatttcaatttgatggttttagatttgatggtgttacttcaatgctttatactcatcatggtattggatcaggattttctggtgattataacgaatatttaaacccatttgctccagttgataaagaagctttagcttatctgatgttagctaatgatttatgttctcaatattcagatgaaaataattgtactattacaactattgcagaagatgtctcaggctatcctacactatgtctgccaaggaaaattggaggtgttggttttgattatagattagcaatgtcaattcctgatatgtggattaaattattaaaacataaatcagatgatgaatgggatatgggtaatatttctcatactttaagtaatcgtcgttacaaggaaaaatgtgttgcatattgtgaatctcatgatcaagctttagttggtgataaaactttagcattttggttaatggatgctgaaatgtatacccatatgtcagtattatcaccattaactttaacagttgatcgtggaattcaaatacataaaatgattagacttattactcaagctttaggtggtgaagcttacttaaattttgaaggtaatgaatttggtcatcctgaatggttagatttcccaagaattggtaatggtcaatcatatcattatgcaagaagacaattcaatttaataaaggatgatttattacgttataaatttttataccaatttgataaggcaatgaatgaaacggagtctaaatttaactggcttaatacagaacctgcatatgtctcattaaaacacgaaggtgacaaactgatagtatttgaaagagcaaataaggtttttatttttaacttccatccaactaatagttataccgattatcgtgttggtgtcaataatgcaggtacctacagaattattttaaatacagatagagttaaatacggtggtcatggttcaattgatgaggaaaaaagtgaatttttcactgttaattcagaatggaataatcgtaataactacattcaagtttacatcccatcaagaacgggtttagttttagcattagaatctgaaatcaattaattggtttctgttcttaatttggtttcaaagtttcaggaagatacgttcatttgtttttttatttatacctatctactatatacctttttccatgttttctaataaaaatataattcattatttgatgttccatctttgtacaaaatcttttaacgtatgcttatcagcaaaaatatcaatacaagtttccaaaaatacattttgtgctgtaaccattgaacttttaatagttaaaaacatcggtttcttcttaataacatcgcctatttcaacatcttcaaatagtctagaaagttgttcaactttatttgataattgccattgagcagtttcaattaattgtttaccacgacagtttggtatgtagaacaaaaatgcatacgaccatttgagagattctctacattctaacaaagcattcacacactctttataaaatacagactcaatccatgaaacaccagaattaatttgtaattccttaatcttattttcaaagatttctaaaatttgtttatccttatcatgtgaaatacgttgattattaaaatgattgaaatagaacatgtacttttccaaactttctctaactttaccaacatcagaatcttcattaggtacatatttatcacatctataattattcttatgtgcagtccaatcacctaaacaaatccaacaaaagttatatgtacatgatttacatgtcatatgattacaaccaccatttttttcaattaatgaatgacatttaggacaatctttggtatttgtttgaatccaattaagtgtttctgaatcatcttcacatttgattttccataattgcacaactttacagggacaaggtgcatgtgcagtttcattacaaccaaagcaaaattgatgattacttttgcatctaactaatggaatcattaataatcgtttaagctcttcaatatttgcaacaatatcggagtcaaaacctataaactgtacaacattatcacagtcaggaaatgggcaatgtttgtatttttttgtgttgattgtacaatatcgactacctatattataccaatattttgatattatagttctattacgcttcttatcgatttcttcacgttctcgttgttgaataatagtatggaaatcatatactagttcatcaattttcatcttctcctttgttttaaccgtgttattaaaattatcttcaacatcaagttgttcatcaaattcaaattcagaatcactgtccaatttatacatctgctttatttgctcttcggaaagtaagttacattcctcttgttttttatgataaaaatgcttctcttccattttattattgtattcacttagcacatttaactcttcgattgttattttaagatgacatttaggatctgcaaatggacattcgatggccatactaccagattcatttttgtttttcacatattggatataacagtccgtacaaaacttatgtttacacccatacattgagaaaaaattcattggttcatcctttgtggggccacaataacagataccacaaagtatattttcatcagtttcggtagatattaaccttgacaggtcttcaggaaattttgcttcataaataccatttttgagtaaatactcttggtgatttggggcattcatgtacatatccagcattttgtgttcattccaagaatactgtagcaataagttcaaacattttccataatctaactgtaacatgttttgaacttttttcacatctttctctaattctttttgtatatcatctaatgctatatttctgtattttagtctatgggtaggaataccacctgaagttctacttttgtaaaatgaatatagtatttcagaagatgagtctgtatttcctggaccgtcatcaaattcgtactctcccgaatcactaatatctacagatgaaagctcatttcccaaaacatcttcatcaactccacttagttcaatagatgagttatcactaaaatcctcaaaatattcatcatcatctgtcataccaaattggtgagtgaagtgtctactagaggaaaaatccagaaggagttttggcatgctacactgtgactaagtcaatgaagacttgaaatcatttactgagcccgcgtttttatgaatgttgagcacaaaaagtaaaatgtatcttgtcaaaatttgagacattcctgaaaataacctttgtcaaaataatgtattcacaatagataacttcaaatgcgtgtctagctaaactcaaaggtaaaattagtcagtaaatattacatataattgtttatctatattctataaatacataatttcccactacggtctccacaaatgaccatattatatggtgtgctaacataacacagagcacgtattaaatcagaaggagacttattttctatttttgaaggtatcccaatatcccttttctcatcatgattcttatgttttaaactttttgtgctttgatgaacaaaacttaaagttgaatttatctgtgtttctgaatattgaggaatatcatcagtttgaacagttccattcgagctagaaactagatgcgtatcacttacatattttagtccccaatcaataatttctttattatacgaggcagttaataatttaccagattgattgccataatatgaataactaattgaagtgttactgtgattttgcgtaaagctgttcaaattatcgggttcatagtgtacctcattaataatatcatcagtgacatcaattactaaataagcttctgcagaaaacaaccctttatcataagaacacataacttttcttggtcggccactattaacatcccaaatgacgacatcggcattaccagttccaccaacaaatgcaattgtattattattttctttcttgaggaagttgacagtattattatcactaaaaaaatcatggaaatggaacatttttgtaattggataagacttgtacttgaacttagtagattttatacatatcttagcatctatgtcaattagatcaataattcctttatcagacccgatgacagcccatttttgacttttatcgacaactagtgaaacagcgtttccatgaagtatattgtttggatattcatacaccacaaccatagctcttatatctatacctattaactttgatgtagcagtaatcatgtatagacctgccaggttatcactcaaacaaaatgtaagattagtggcatatttttcagctttatctaatttataatgtcttattaatgttattgatgttttctgatatctatttttgtcatcattatcaaaagttccaacaaaatcaactctatagatatccacactaccatctaatttagagacagcaaaacaatttcttcctggcatcatacataatgatttaataggagagcctaggttgacagataaacatgaatcaccagtaacatccacctctaacctgtgagtatcccatattttcaaaaatccttctgaatcacatgatataaaaaactcgtgttgaggtgcagcaacaatgtctacaatcgaagaattatgctcaatcaacatagcaacaaaaccatcatgatggtgtgagatgtgattagtattttgtgaattttttttacttattaaatttgtgtcaataaaacggccaaattcaggataatctccaatttctggctcaaacttaataccatttaaaaactttaatattgaagtatttttaccagggtaactaattctgacatctgaatgaatctctttcaatttcatcgtttcatcaaacacattaccttcaccaaaattatcaaatattgagttctcattacttggtaagtgaatattatttgtatcagatgaataaacggatttaccacttgtcatcactattggacgtggagcttgtagatttttcagaatgagtggttggtttttatttggatcatttttagagcttaaagtattaatgtttagctgggcaaactctttgatgtcactattttgttgctttgctgacttgggtatatacttatgagtcacatcaataaaaacatttcttggagcaagatgtaatttctcagagttagatttgatatttgacgatctgatattgagtcttgttaatttataaatatatgatctaaaactagcaatcttccatatatctgctgcatcaagtcccaaactaatgatttgacctaaaaattttaaatctgtattactcaatggaacttgataattcggagtgtatgtgtcggcttgcaaatttttatgcaacccatcccttgattctaaactcccttcattctttctcaaaaactttaacttgctaataccaaacatgtcaacatctctgtacggattattggtagatgattttttccaaaataaactttcttgatttgacaaacaccaaagttttaaagtttcaaatacaacacgtgtaagcggttcatgacatgaaatataaatgttcttccaagtgaactcttctacttcatgctgtagatatggtcttacgataggatatagcaaacaataaaaatccgcaactggaatttgacttgatataacaataataagtttcaaaattgattgacgaactaaaccatttggatgtataattaatattactgataaattgagcaagtcagcaaaacattcatgacgtatcattcccaatgaaataagttgagatagcgctctcaggagagtaatcactattgtttcttcaggtccataaattgattgtagtaataaaggtaagatatattgttctaaactggtcacaccaacaaaaacagacaatggaacaatactggcaacaaacgagagttttatttgtgggtctttatcattcaagtatgtaataacatgacttaaaattatatcattagttttttgtttcccaaaaaatgaacataatggctttatattctgcatcaatgcaattctaacataaacattgctgtcagtcaaaatttgagttgttaaagtttcaaaactctcaaaatttgagtcaaattccaaatcattcttatctctttcattgaaaattatactatcgatatcaggatcatgataagtaccgactttgtttttcaaaagtatcgagagttcaaatacctttttagaagacattgctaaatatggtaaacatgcagcaaatatcattcttacatagtttcctgacttgatgctttttctttcattattgtttgagttgcttaaatctgaggtattcatcatatctttggtctctttataattccgaatatatgatctattcaaaaatacttgtaatttaggtataatatactccgagaatacgtgaatgttaattggtgtaattgtatctatcatcatcaacatttgtgtaatacatattagtgcagaaacttgaacgttttcactaggatcgtcaagcatattaactaaatagggtaaacatcgatcaaacttcgcttcatcgtgtaattgctcactaaatgctagtattaattcacatgccttaattctgtatgaagaatgtgttgtgtttctaacatttgaattcaatagagataagaagattaaagatccaaaatcattgtacgaattctttgtaataatttttgatgtagcccttggtatatgtctgttcattccaggcaagttcaatttaacggggattatgttgtcctgcctattcgtagagttatttgaattgaattcatcagtatcaataatgttagttttaaatcctaaatacaatgcaatcttatcaaaatctttgtacattcgatcaattctataatcacacttttgaaaattgtttccttctgaatttgatgaagaaggtgagtttgataaagtgttcatgtagctgtaaagaaaagtgtaaaagtaatcaggaaataacgtcttacggtattcggataaatattcttttgctgtgagtctgtcggttggatttaagctgatcatattttgaaccaactttttgatgtttgtatcttctatggaatccagttttggagaatattcaccctttttatatttgaacatttgaggaagagaaaataaaggtaaaccatctgaatataattcagcaatcacacaacccaatgaaaatatatcaaatccaggtaaaagcttattattatcagcactgatattatctaattcctcttttgttttaaatctttccggtgcaatacaacatgaatgtctttgcactgtatcaaaataaaatgaaaagtgtgtttgattataatctggtaaatataccggtttgaataaagcaatatcagatagcataatcgaattccacgatgttaacaaaacattttccgttttaatatcaccatgataaacaccaacatcatgcattttagataatgcaacaagtaattgatatactatccattttttttcaatattttcaaaaaaaggtctaattgataatctatcatatagattatatcgcacataaggtcttatcaaatatgtagctctatcagaatcaattaaagtatcaaatgctaatgtattgggtatattttgtaatttttgtttgacttcattaagtttatttaaatatggtttcatatcaatttccacacttgaaggttttataagtaattttgtcaccacatatccttctgatgataaacattgaatggttttcaagaatcgtgatgtacctaaaggtttaaaatattgtaataacggtaggaaatctatataagcagatatggcaattgtatgagcagtaggtgaaaccaatgaaaaatcaaactccatattatgaagagcttgcgcattaggttcgttcataactaattatctaatttgtagtttgacttctttgtaattgtcgaagaaaatagaaataaagcagtatatcacaatcaatacaccagcttaataataacaatcgaaacatgaagcatcatgaaaacatgaatctcatcaacggctcagctatcgcaccttcctaatcgggcagaatcacattccctcacggggacgaatcttaaatgtagtcttttcgtatactttgattagtgtttcttataggttacaaggtatatttctgcttctacaagataatttactgtagcacagtaaataaatagctcagtctttgctttataaattttttagttggctacaatatcaataatctaatttctctatgactatcaacagctttttatataaggatggatttggtgcacaagctttctacaacgctaaaaatgcgttacatggatatacagatactaatgtggctaatgagactaaacatagtaatacctatagtactgttgaatcaagagcacaaaaaccatacgataatagagttccctatgaaaaagcaaacttcttgattgattctagatatagcgttcaacatattcttggtaaaggttcgtatggtactgtttgttctgcaattgatctaaattcaaaggataaatcttcattggctattaagaaagtttgtaatatcttcaataaggaagtgttacttaaacgtgctattagagaattaaaattaatggaatattttaaaggacataaaaatattattggtttagtggatttagatatagtttatgttaaaccatatgatgggctttattgttttcaagaattagttgattatgatttagccaaagtcattcatagttctgttcaattttctgagtttcatattcaatcttttttttatcaaatttgttgtggcttaaaatatattcattctgctgatgttatacatagagatttaaagccaggtaatattttagtgacatctcaaggatgtttaaaaatatgtgattttggattagctagaggtattaatagtagatacatgaatcataatcataaaagtagcaatataaccaattatgttgctacaagatggtacagagctccggaattaattttatctagaaagccatatggtaaagccgttgatatttgggcaattgggtgtatctttgctgaattatacagtcgtagaccaattttcattggagatgatcaaattatgcaaattactgaaatttgtaaaattattggagcaccaagtaaggaaattatatttagttatggaaccacaattgcatgggaatttttttcagatccaaaacctaaatttcaaaagaaggaatggtgtgatttatatccacatgcaaataattatgcacatgatttattagataaactggtttgttggaatgttaataaacgttatacaattgatcaaattttaaaacatccatatttgaaaaaagttagtaatccagatgaggaagttgttatggatgaaccatttgattttagttttgaatggaaggctaaaaatttaaatgatttaaaaatggtgttacatgatgaagttactaatttcaaagagaaaaagcaacaaatagattttaaaggtatgatgtaataatttatataaaagaaattttaaattgtaacgaatattttaattaaatttaaattaacacacaataattattaggatatttttgtgaatctattaaattgaatattttgtatatttataagtaaaaaatgaaatgtatctataaaaaaagtatctattaagggggtatagtttataaaaatgtttaaaatgatgtaaaatgtttattaataaaattcaagcgtattgataaattgatctagttcctgaatctggaataaaacttaaattaagttgttgaaatttatcagtgtatttatgatagtaaattccttcgaatgaaccagttgattgattaaaacaaatataataaaatccagcaaatgaagcacctttaatacctttaacagttgcatcagggtataaaaataattctttccaacgcataaaaatatacgtttgtgataatgaactattatagtaatcatcattactcaaatcattattcatatttatattgagatctctccaagaaggaaatcttgcccaatgttgaatatcatttcgtatatttgattcccattgaggattttcagtaataaaagaatgatgtttaccaataatttcacctttgaaaaatgttgtaattgttggatttgaatctgtaagattataaattgttaaaaaccctgaaataaaagaatcttccatattaacttcagttaattttacattaacttcgtaccgtgaaaaccctgattcctgaaatccagtgaattttgcattgggttttaagtatgaagtattccaattgtttttaggctttggtaggacgggttgtggtataggtgatactaacttaaatgattgatttttagagctctgaacacttaattttttaacagatacagggtctattttctgatccttcttaacaacaattttatcaacttgatctttctcttttataatctgctctaccatgtattaatactccactatcttgttataaaataaactaaaacaaagaacattgtcaaagttgtaacaatagaaaaaagaaacggtgatctagccaaaagataattttccacagaaacaataaaaaatttttgttatcgcggtgctaatgccgccgataagagaaaaatggcatttttttcaacagccagttgctgagtcatggccaggtgaaggttggtgattcgtatatatacaatacttcttttcaatacaagtatagacacatcaattaacaaactacacagcacacgattctatgacacaagaatctgaaataccgttactcttggatgaaccagtatcaccatcaagtgctaataccgctaaagatatatttgcaggtacaatgggtggtattgcacaagttttagttggtcaacctttcgataccactaaagttagattacaatcctcatcaaattcaaatacatcaccaattgaagttgttagatcattattgaagaatgaaggtcctttagcattttataaaggttctttattaccattaattggtattggtgcatgtgtttcaattcaatttagtgttaatgaatatatgaaaagagttttcacatatattaataatggaccaggtaatatgacaattggtcaatttttcattgcaggtggattaggtggatttgctaatggttttttagcaggtccaattgaacatgttagaattagattacaaattcaaacaaagacaacatcaacaaataataatagtagaatttataaaggaccatttgatgttttaaggcatttaaatgaagttggtggaatcagtactatttatagaggtattgtaccaacattattacgtgaatctttaggtattggtatttattttatgacattcgaagcactagttcaaaattcaatgagaaaaaataatttattaagaaaacaagttgaatcatggaaattatgtttatatggtggtttatcaggttatacaatgtggttaacatgttatccaattgatgttataaaaagtaaattacaaactgatacattaggtaactggaaatataaaaatagtttatcagttgttaaagatttatggaaaacacaaggatggagagggttctttgtgggatttaccccaacaattcttcgtgcagctccagctaatgctgcaacatttgttgcatttgaatggacaatgcgtttattaaactagaatgaagctgtatgaacttgattccccagtattcaattttgtgtaattacgtaatacttaagaaattataatagtaacaaatttgagtcacaatactcgacaataatctttatcttaatgataatgattgttttaatttgggagattaatgatacttctttttaaaagatttataagtaaacaaagaaacagaatgaattttatggatccagaaagtgtttataatctctcaaatattcgagaagatttaattagaatggaagatacaattatctttaatttaattgaaagatcagatttttatagaaatccatcaatttatgtaaatgattctgataagattaaaataccaaattttaatggatcattccttgattggcttttccaacaacatgaaacaattgaatcacaagttagaagatatcaatcacctgatcaatatccattttatccaaatgttattaaagaatcatttttaccaccaattaaatatccaaaattattagcaaattattttagggaagttaatgttaataaagaaataatggaaatttatataaaggagatgattccaagagttgctaaaaaggaaggtgatgatgatgaaaattttggatcaactgcaatgagtgatattataacattacaaagtattagtcgtagaattcattttggtatgtttgtagctgaagcaaaatttcaagctgatagagaattatatacaaatttaatagaagataaagatattgatggaattgttgaaaatataacaaattcagcagttgaagaaaaaattttaaatagattattaattaaggcaaagacatatggtacagatccaacatcacatgaaagtaataataaagttcatcctgaagcagttgttggaatttataaagattgggttattccattaacaaagaaagttgaagttgaatatttattacgtagacttgaagatgaattttaataatgctgggaataatacttattaatcttgatataagaactatataaaattaaacaaaaactctttaaaaagcaataaatacaaaaaaataaaccctgatcctacctttttaattcgaaatttttcaatttagcttcatcatttaaattatcatcaacaattccacgtttataaaaatgatctaaaacttctctaacatcagctaaactaaaagacattgataattttctccaccataaaaatctattaattctatcttgttttgtatcacctaaaccataatttgtataggcatgaaataaatcatcctctgatttttcatgaactgaaatatttgaacttgataaacttttattatattcttcaccaattaaatcatcataaaggtataaatgagttagttgtaaacaaccatagattgttaatgttaataaagtacttaaaataatcgttcttttattatctttaaattcttgtttccaatcaccatttttagaagtattccaagatttatcattttgaaatccataagcagtttcataaccatatttatatttatcttcccaagtacctgtttcatatgaagtaaaatttgatttataaaaatttgattgataatttgatgaattatgattacgatattgataacttgaaggattatacatatttggatttgttcttaaattaatattatcattccaaccaattttgtaattatcataattggattttgaaattggatttttaagtaaattatatgcagataaaatttttttaaatctttcatccttaattttatcattaattgaagttattgaatgagaatttgagtcaggatgataaattttagcaaatttaaagaaaattttctttaattgttttggatcaattgaatcatttgattttatatttagtatatcataaggtgaagcattttcattagtggggtatgagttaatgattaattcaatatcattatttagtttatttgaatttgaatttgaatttgaatcaggttctgttatttgagcatagtaccggttaaatcggagataatttctagtataagtagttgtgccataatgtgaatataatttatttaaacatcgtaagttattgttatatttattcaataacatgacgatagttcagagaaagatatatatataaggaagagatgaatagtacaaagtaaataatattaacaatttacggaatcattcaccattataatataataattaatgattcacctatcaaataaaaaagacattgccttaatcaattattacatcaattattatgcattatataaagactgttactataaaaataaaaataaattgattacgtaaagataaaagataagacttttatcgtcccatcgaccacagtaaaaatatttgtcacgtgacccttacgtaatcacacaataaaataacagttattagtcatagtaataataataggttcacaaaagtccgttatcgggaaactaatagtgattatggataaatgggagaatctccggggttgattaaattatttttttcattgaatttgataataaaaatatccttatatctggatcagtttcgtgtttttttgacatttatctttcttttctttcttgttttaattccttaataacctttcatcaattaagcaccatcttacaatatgagtgaaaaaattgaaaagaaaccaattacattttcaaatcttttattaggtgcaggtttaaaccttgcagaagtttcaactttaggtcaaccattagaagtcacaaagactacaatggcagcaaatagagattttggtttaattaaatctgttaaacatatttggaatagaggtggtgttttaggtttttatcaaggtttaattccttgggcttggtttgaagcttcaacaaaaggtgcagttttattagctgttatgactgaaggtgaatatcaatttagagttttaggtgcttcaccatttgtttcaggtattggtggtggtatgcttggtggtttatcacaagcttatcttacaatgggattttgtacttgtatgaaaactgttgaaattactcgttcaaaagatctttcaaagagtactttacaagttttcaaagaaatttatcaaaaggaaggtattaaaggtattaataaaggtgttaatgcagttgcaatgagacaatgtactaattggggttcaagatttggtttagctagattagcagaagattggattaaaactttatcaaataagggtaaagatgataaattaaatgcatttgaaaaaattttaagttcaataattggtggtggtttaagtgcttggaatcaaccttttgaagttgctagagttgaaatgcaaagtagagttaatgatccaaatagaccaaaaaatttaactgttggtaaaactttaaaatatgtttatcaaactcatggtattaaaggtttatataaaggtgttactccaagaattggtttaggtgtttggcaaacaattttcatggtttcattaggtgattatgcaaaagaatatattgctggttttggtaaatcgaaagctttgaaatagacttaataattgatacttttgataagtgttaatatttactactttactaaacttatataaaataataataaaacaaaattagaattaaaaataataaaatagtatttaaaacgattgtagatgtaaaaaatgatgtgattttatatgatttgaattgatttgatttcagttaatgaatgactttagttagaaaggtatataaagcgttttttttttttgtgtgtgtatgcatgaatgcaggatagaagagatctcatctttgaactccccatttatcataacaatataatccaataaatgttaatgataaaccaaaatattgttggaaattaaggttaataccttcaattataattgaacatgaaataattataattcttttcaaaatatttgcaattgaataattaacaggtgaaaccatacccaaaatttgaaatgcagttaatgattgaataaaatgtgaaattccataataaataattaatttacaaattcttgaatttaaatttgaaattgataaatttgttaaacttgaataattaccaatttctgatataatataaaatggtaatgtaagcacaaatccaacaattgaacaataaaataaaactgataatttatctaattttttattattagttgattcatgtggtaaatattttttatttaattcagttgatgaattattaactgaatttggtgatgaatttaatggtgatgacatttgatattcaaattcattaatattgatattactattagaattattattatgttggaaattaaaatatgttggtctaatattttctcttggttgatatgaatcaattgaaactggtaaaagtggtgttgaaattgctgattcaggtttagttattttccaattaaatctacttaaaaatgctttagctcttgattcatcatcatcatcatcatcattagtaaagctatttttcctaattttattatagatataatcattatttatattatcatcagcactagattccttttcatcatcccaagttaaaatttttttagcaaagatattttgacttacaaatattaacattgaaataaatgcaaatattgcacctttaataaataaagaatttgaaatttttaaattatcatttcttgtacaagataacataacaccagtaattaaaggtattaaagtaatataagttttatattgaaattttttattgaaaaaaaatctataaattaaaactgttgttaatggagataaagctttaattgtatgaactaatgaaactggtataattgaagttgaattatgacttgcaatttgacctaaaaattgaaataaacccattggtatagttgtttttaaaattaattttgaaggtaaaaggaaattatttaaaattgaatattgattattaattaataaaggtgggaaagtaccatttgggaaattttgatgaatattaattttacctaattgataaaataatttaattgaaaataataaaattaaacataataaagcatttataataaattgaatttcagttaatgaaacaggatatttaaaatcaattaaaatttgttttgttgttgaagatgaaataactgaagtaaaataccaaataaagcataaaaatattaattttaaattaaaatttggtaaattttttagaaaagtatttaaattgtgaatgggcacaataaataacttttttaacattgaattattttagattaatgttaaaaaatgaggtgaggtgtgctattaaagaatgaaaagaggttaaaagaatggaaagaatatgaaaatgtgaaaatagaattcaaactataattcaaaataaaatatgaaaattccaaaattcatgttggtgtttgtttctgtttactgtttactatttacgtttctattgttaactgaaattgctctatatcaccatagtgatattctagaatttgctttagagaaaaaattaaaaaattgaaaaaatagaagaaattacattacgtaagaaagacacgtgactctcacgtgactaaataatatttacgtaatccatggtcattacataatcaagggaaaaagaaaagggaaaaaatgttgggcagaaacggttgatctcttatcctagtaataataataatctcaccgagaatttatttagctattaacatgattttttataatattatttattattgatggatgattatatattttatggtttctttttacaattttattttgacagtttattaaatactatatgtctattatgaaccccttttcttaaatatttcatcctatctcttcttgcatctctttgtttttcttcatctacccctttcctttaaccatcttttatcactgattgatcttaaccctttatcatgtcatctgtaactatctcaaaatctgttactaaaaatttatctgctgttgatactttaggtaataaatttactgctcctgattatacaattaaacaaattttagatgcaattccaaaaaaatgttataatagatatttaacttcatcattttattacgttttcagagatatcgctttatgtattactttcggttcaattgctcaatatttaattccaaaaattgataattattatcttagagccgcttcttggttaatttatgcattcattcaatctttaccttatactggtatatgggttttagctcatgaatgtggtcatcaagctttctctgattatggttgggttaatgatactgttggttggattttacattcttatcttttagttccatatttctcttggaaatattctcatggtaaacatcataaagcaacaggtcatttaactagagatatggttttcgttccaccaacaaaggaagaatttttaaataaaaatcatgttatttcattatctgaattatccgctgatgctccaataattactttaaaagatttacttattcaacaatttggtggttggttagcttatttagttactgatgttacaggtcaacctcatcctgaattaggtaataaatggtattcatcattatttgcttcacattttaatccttcatctccaatttttgaaaagagagattattggtttattgttttatctgatttaggtatgatttcacaattttttatactttatcaatggattaatcattttggttggtttaattgttttgttcattggtttttaccatatgttttaactaatcattggttagttttcattacttatttacaacattcagatgttactttaccacattatgaagatcatgaatggaattttgcaagaggtgcagctgcaacaattgatagaaaatttggttttattggtccattctttttccatgatattattgaaactcacgttttacatcattatgtttcaagaattcctttctataatgctagaattggtacaaaggcaattaaagaagttatgggtgataattatgctttctctgatgaaaatatgtgggttacattatggaaatctgctagatattgtcaattcgttgatggtaataatggtcttaaaatgtttagaaatgtaaatggtttaggtgttgatccaactaaataatgttattctttttcttattcgtataattcttagtctattattgtttcttatccttatatatctaaattatagaaatttataaatttattaattaattatccttgtttttatttcaaattacatacccattggatttttaatacaataacaaacagttattggcattgaaataaccaatactaaatattgtaaaatcatatataaaccaacacaatttaatggagtacaagttttatcattaggtttcattgcagctgcagttaaataaatttgaactgttgcacttggtaatgcatattccattatacaaacgaaaattgccattggatcatcaatccaaccaatatttttcaatcttgtaataaaagctgtaccaataattggtaatatacataatctgaaaattgtatgacaaactgcacttttccaaaatcctttaggtacttgattaaattctaatctagctaaaactgatccaattaataataaccccattggaacacatggatatcctaaatattctgcatataataatataaaatttaatggaggtttttgatttggtgcattaggtaattgaacagtacctgtttcaacaaataatgcttttaaccaaggaattaatgcaattataattgatataactaaagcaactgaatttggctttttaaaatttgataaaaagaaaacaatgaaacctaaatgaaatttatttaaaaatttaattattctatttccaccttcattttcatttattttagcatcagttatatttgtttcagttataattttcattgtagttgacatattttgattaaatggttgaacatgagaatattctctaataagttcttgatttaatgatattaaatcatcatttgattgattaatcgaattattttcctttttatttaaatttctagctgatgcaactttagataatgcaatattagaagaaaatgatttatttgttaaaactctacttaaatgtgatatatttgatttaatttcacttaatggtaatggatctaacttttcactaaatcttctttttctggttggattgttaatagtattagaatcatctgacattattgatgatgttggagatattggactttcacttgaaaatgattgtctttgttgttgttgtacggaatcagtacgagaacttgatgaagtttctgaatcaattgctatatccatatgatcattattatcattatctttatctttattattattattattattatcattaatttctttattttcgatattttcctcatctaatttatccttatattcaaaatcccattcaactaatttaaataaaccacaattaaattgtactaaaacatacattgctaaccaaataataacataagcagtacctttattttgttgatctaatgagaaaattgtaacagcttgaatataagaaattggtaaatcagagacattttgcattataccagctaataaagcaccaccaacccatctattatttgaatttttcggtattggagtgaaataaacaattaaaattgcaatacatgaattaattaaatacattataaaagcacagaagcaaataacaccaattgttttaatatcactaattgaaatatatgaaacaattttatcgaaaactaatgaaggcatgaaaatcatcataaccatatcagagaaagctcttgcagctgtaacaccgaaataaccttttcttgtaaggaaaaatcctgaaccaatgatcatatacattcgtatcatcggtataaccgatgaatatactatctcacctaatggtgcacctgtcattaccccccaaaaggaaaagagataagtgataaaaattaatgaaaattaagaatctgaaaaataaatttatcaatcagtcaatcaatcaatcatgttactactgatcggtctcgcggagttagataaccgaataaatcatttattttactgataataagtgggtaacgatacccgttatattgtaataagtagggattataataggataaggggaagtataatatgcattaataatcatagttatcacgcataacagctttcatactttccttttcctccaaagtatgatataatataatataatacagtatcttcccactgataagaggctgatcaagcaaaagattagctaatatactaatactagtaaaaatgaaaaatttttccaactgctgacaatcaagtgtttattatttaaatttatttttggtgtttgtttccgttgggttgtagaatttggatcaaaattttcatttatagttgttttttattattttacttctttacttcctcttctcttttattaagtatattcaatggcttcaactgctcctgtaactactaaaaaggttactactaatcttcatgcaaaggatttaaatggtaatgatttccaagcacctgattattcaattgctgaacttattaatgttatcccaaaagattgctttaaacgtgatttaattaaatctttatcattcgttttccgtgatattttcttccttatcttatttggttatattgcaaatactttcatccctcaaattccaagtaaaaatttaagatttttagcttggtcaatttatacaataattgaatcattcccaatggttggtctttggattttagctcatgaatgtggtcatcaagctttctctgaatatggtttaattaatgattttgttggttggatcttacattcttatactggtaatccttatttctcttggaaaatttctcatagaaaacatcatcaacatactggtcatattgataaagatatggttttcattcctccaagaactaaagattggaaaaaaaaacataatgttttatctttaaaggaagttaccgctgatgctccaatttcaacaattattaccttaattattcaacaagttgttggttttcaaacttatttagcaattgatgcaactggtcaaaaacatcctgaattagaaggaagatggattgatcaatttaaagcttcacattttaatccaaatgctccaattttcgataaaggtgattattggttaattgttttatcagatttaggtattttaacaactttattcgttgtttatcaatggattattaattttggttggtttaattgtatggttcattggtttatcccttatttattagttaatcattggattgtctttttaacttatttacaacatactgatattacagttcctcattatgaagataatgaatggaattttgcaagaggtgcagcttcaacaattgatagagaatttggtttcgttggagaatttttctttcatgatattattgaaactcatgttttacatcattatgttgcaagaattcctttctataatggtagaaaagcaacaaaggcaattaaagaatttatgggtgataattatagacatagtgatgagagtatgtttattacattatggaaatgtttaagatcttgtgaattcgttgaaggtgataatggtatcttaatgtacagaaaccataataatatcggtcttactccaatcgataattaatttatacctacttcatctatgtggattgatggattgttgggaaaaaaatgttaacattctttttatctcttttcttattcattcattcattcattcattcatcatttcattctttgtgatttctgtattttgttattttattcttagattattagattttatttttctttcatatttctcaactttactatatttattttgcaaaacatttagatttatgttttttattttatattttattttattttattttattttattttattttattttattttaatttaaatattaaatagtatattataaaaaaaatagttatttaaacaacgggtatatattaataatcatacaggtatcttagagaaattcaattacattttggataacattttcattcatatttttaccccataataaatctaaatgttcatatccattaataccgaaaactcttagctcatttaatctatcacttaaatttacttttataacttcagtttcactattattatcaccataaccatattcttcatcatcatcattttcaataataacttcaacattatcataaattttctttttaccaacaattttaccatctttaatttgtgtaattgtttggttactaaattcaggtaattgattaattaatatatcaatatcaactaatgaatcattcataccataaataattaaaattttagatattttaatagtttcacttgttggatattcaaatggttgaaaataatctctttcttgatacatttgaaatttttttgatttaataatttgaaaccaatgaacaacacatttaactgatgttgttgaataaagatgataataagaaattaatttttgaattatatcaatatttttacttttccaattaaataataaatcatttggtaaatcaattaattttataaacattggtggataagttatatttctccaaaataaaactgatttcattaatatttttttaccaaataatttataaattaattcaggatcaaaattaataattgaattaataagccaattagataattttttaggagttgttgcaggtgcaattaatactaatttttcaattttattatttaaatcatcattaattgaaacagatgataaaatttgtgaacaaccttgactaaatccaatataaattaatttttcaatatttttcaattttaaaatataattaattgatgatggtatatcatacattgcaaattcatcaattgaaaaattccaaaattcaacatcatttgaattgtatttctcatgtttattagaatatttattacctctattattaccaaggaaaacatcaaatcctaattcacataatctaaatggtaaattatcatctttattaaacataacacaccaaacatcacttgtcattaataatccatgttggaaataaactgctctattatttgatttaaacccatttttagttggatcaagtctatgaatagttaatttaaatccatcttgagttggtactaaatgagattcagatataaaaccatttaattcagcaattttttggaaactttcaaaatttcttaattgttcaactttatgtaaaacttcatcacctaatttttcattatcagtttcatttataaattcattatatttttcattatttgttttgaaaaatgtgaaaataaatctacttaaagttgtacaaatgttaataattgattttggtaataaaattgtaattgatgaaataatttgttctaaaataattaatgaaattgaaattgcattctcaactttttgtaatgtatttattctttcattatcaataatattagtattttcatcaatattagaatgtctggtattagcatcatctgtactatcccgtatcatattatcatttgcctcaacagattcatccccgttttcattattaatttcagtcaatgcattaagtatattccgttgagataagttgattggagatgcattaatattttcaacttgttcactcacagattttctatgtgttctccttttaggagtggtcaatggtgatatcattccttgtgacccgaatgaaataaagaaagatttgagttaaaaagaatgggtgtttcttaaatgttaatttaaattattgatattgacatgtactgtaaataaaactgcccaaaggtggctcatcgggaaattcccccttattccctatctaatattccgcgcaaaacgcacacaataaaagacgccaatttcccgaggggttcgtccactttagtgagtaatacaataaaataattttaaaattttactattgaaattttactattgaaatttcaacaccttttccacagtacatgaaattcacatcgatgaaattgcatgttttaatcatttctttctttttttcttgatttcctctatttatcttctctcctttcactagacaatgtctgaagaagctgaacaatctgctcatttctcattcccaagggaagaagaaaaagttttaaaacattgggaagaaattgatgctttccatacttcattaaaattaaatgaagataaacctgcatttacattttatgatggtcctccatttgcaactggtactcctcattatggtcatttcttagcttcaactattaaagatattattccaagatatgctaatatgaatggtttctcagttgaaagaagatttggttgggatactcatggtttacctgttgaacatgaaattgacaagaaattaggtatttcttcaaagcaagatgttatggatttaggtattgataaatataatcaagaatgtagagatattgttatgagatatgcatctgaatggaaatatgcaattacaagattaggtagatggattgattttgaaaatgattataaaactttatatccaacttttatggaatcttgttggtgggcttttaaagaattatataaaaaggaagctgtctatcaaggtttaagagttatgccttattcaactggtgttacaactgctttatctaattttgaagcaggtttaaattataaagatgttaatgatcctgcagttactgttgctttccaattagctaatgatgaaaaaactttcttagttgcttggactactactccttggactttaccttcaaatattgcattatgtgttaatcctgaacttgaatattctaaaattttcgatgaagaaaaacaagttacttatattatgttagaatcattaattaaaaacttatataagaaaccaaaggatgctaaatttaaaattactggtactattaaaggttctgaattagttggtttaaaatatattccattatttgattattttaaggaaaaattcactgaaactggttttagagttattggtgcatcttatgtttccgatgaatcaggtactggtattgttcatcaagctccagcttttggtgaacaggattttgatgaatgtacagctaatggtgttatctctgaaaaattaacccctccaaaccctgttgatgatgatggtaaatttactgatgaagtctctgattttaaaggtttatatgttaaagatgctgataaagaaattatgaaacatttaactgcaaagggtaatttattgttacaagctcaaattagacatagttatccattctgttggagatctgatactcctttattatatagaactgttccagcttggtttattagagttaaagaaattattccacaaattcttgattctgttaatgaaactagatgggttccaagtaatattaaggaaaaaagatttagtaattggattgaaaatgcaagagattggaatgtttcaagaaatagatattggggtactccaattcctttatgggtctctgatgatggtgaagaagttgtctgtgttggttcaattgaagaattaagacaattatcaggtgatgattcaattactgatattcatagagataagattgatcatattactattccttcaaagcaaggtaaaggtcaattaaagagaattgaagatgttttcgattgttggtttgaatctggttcaatgccttatgcctcgaaacattatccatttgaaaatgcagaaaaattctctaatgcattcccagctaatttcatttctgaaggtttagatcaaactagaggttggttctatactttatctgttttaggtactcatttattcggtagagttccttataagaatgttattgtttcaggtattattttagcaggtgatggtaaaaaaatgtcaaagagattaaagaattatccagatccaaacttaattacaactaaatatggtgcggatgctcttagattatatttaattaattctccagttttaagagctgaaactttgaaattcaaggaagaaggtgttaaggaagttgtctctaaagttttattaccatggtggaattcttataaattcttagaaggtcaaattgctttattgaaaaaaactgaaaatattgatttcaaatttgatgaaaattctaaatctgataatgttatggatagatggattttagcttctttacaatcattaattaaatgtattcatgaagaaatgggtgaatatagattatataccgttgttccaagattattaggattaattgatcaattaactaattggtatattagattaaatagaagaagattaaagggtgaaaatggtattccagattgtctgaaagcccttaatactttaactgaaactttatttatcttagttagagcaatggcaccatttactccattcttatctgatgcaatttatcaaagattaagaccattatttactgaagaaactttaaataaatatggtgttgatcatagatgtgttcatttcttatcatacccaactgttaatgaagaacttttcgatgaaaagattgaaactgctgttggtagaatgcaaaaaattatcgatttaggtagaaatattagagaaaagaaaacaatttcattaaagactccattaaaggaattagttattttacattctgataaagattacttaaatgatgttgaatctttaaagaaatatattattgaagaattaaatgttagagaagttatcattacatctgatgaagataaatatggtgttgaatatagagcagttgcagattggccagtcttaggtaagaaattaaagaaagatgcaaagattgtcaaggcaggattaccaaaattaacatctgatgaagttaaagatttccttaaatcaggtaaagttactgtttcaggtattgaattaacatctgaagatttaaatgtcttaagaggattaccagattctaaaactttatcaggtcaagaatcaagatctgaagctgatgttttaattattttagatattaatttatatccagaattagaaactgaaggtattgcaagagaattaattaatagaattcaaagattaagaaagaaatttggtcttgaacaaactgatgaagttttagttcaatatgaagttaagaaagatgattgtgatattgaaaaagttattaaagatcattcagaaattttacttaaaattactaaagttccaatggaacatatctctgaatctgataaaactatgattggtgaagaagatgcaactatcaatgatactgtcattgcattaagacttctcaaattataaattctctagtttccccctttatatatagtttaaatattttataagaataatcatttcatttcaaattataaaggtaatgtcagtagaaactggtgtaacaaaatagatttgaaatagttacccgcactttgtgttattttttttttttctttggtgaaatcaaaatagacatgattctgtagttaagattaagtcttggatcactaatctttaacttaacaagtatatttcaataaccattcacagttttattaagtttaaaaacacagttgaaaaaaacttgagataacagaatgtcatttgggtcaagattaggaggtttcggagctaatgtttcaacaatcagtaatacatcaactttaggtaatacaacaacagcaacaggttcattacaagatttacaaaatgatatagtggttccaaatataggtgatgatagtgtaagtgatatagcattttcaccacaagctgaatttatggctatttccaattgggataaaaaaaatagaatttatgaaattacaaataatggtacagttgaaggtagagcattatacgaacatgaaggacctatactatcaacaagatttacagcagatggtactaaagtaattagtggaggtgcagataagcaagttaaattatttgatttagcatcacaacaagcacaaactattggtattcataatgatgcagtaaaagttgttagacatgttacatgtggaccacaaaataccccttgtgttgttagtggatcgtgggataaaactattaaatattgggatatgagacaacaaaatccaatttgtacattaaatatgccagaaagagtttatgcaatggattcatcacaacaattattagttgttggtacagctgagagacatgtagtaattataaatttaaataatcctgatacaatttttaaatcaactttatcaccattaaaatatcaaactagaacaattggatgttatccaaaaggtgatggttatggaattggttcaattgaaggtagatgtggtattcaatatgttgatgatatacaacaaaagcaaaatggtttttcatttaaatgtcaaagagttaataaaacagcaacaaaggaatcaaatattttttcattaaattcaattgtctttaatccacaatttggtacttttgcaactgctggttcagatggtacattttcattctgggataaagattcaagacatcgtttgaaaggtttcccatcattaaatgcaactataccagttgccaattttaatagaacgggtatgttatttgcatatgctttaagttatgattggagtaagggacatcaagcaaatacaccaaattataccaatacagttagaatacatgtatgtaatgaagaggaagttaaaccaaaaccaaaaaggaagtaaggatctttgtttaaattaaaataataagctgattttttcttcaaagacaattatgtttaattcgtgtaaaattctataaataataatgaaaattttgataaaaagtaaatgtatttataatatcgaaacaaagtagagagtaaatatacaaagttaagtgaatagaaaagtttatttgatttgaatttgaaatctcaaaattcagtagttttattaagaaaaggatatggatctctaaattccattcctttcgacgttatcgctccagaaatcaggtaacatttcagagttatcttcagcagtatataatccaaaatcaaagaattgttcagagacattaagatcacctaataagtgtggatcatcttcaataccaaatcctcctgtattagtagctggttgttgaggatcagtttctcctgccttggtaccggccttggcatttttctttgctgctccctttgtagcaggtttatctgcagcagcttttttagtagttcttcccttacgtatacgtttattatcaccagggggtggaatacttgatttatcattatttgaatctgtagtaacaccttctttaacactttcaagtggagtagttgcatcttctttaatgattggagttgtaacagatgaagatgttttcttctttgtacgtttagtagtattcgaagatgctgatgatgcaattatcgatccatttggacttaaaactttacccgtttgaggagttgtagggttgtttggagttgctggtgtaacaggtactgaaacagatattgagttctttctggattttcttggtttctttctaccattggccccactatcatttggagttccaccattagttgattttttaccagaatttggtgaaggttcattatttcgtgaaggttttgaggaaatattttgttgtaattgacctaacatattagaaaattcggcaaattgagaattagtctcatttttactgctattattgtctttagaattagaactcatgtttgaacctgaattttgatttgaattggtattcatatcttgaagtcttttcctattttcggattctaacagtctaagattttcaccatattccttaactccttcatttggataatttttcttaacgtaaccatttggaacttgttggttcatatatagtggttgttgtggttgtaatggtggaggttgatcaaatgaatttgcaggagttggagcttgtgattgtggtctagaaaatgaagtgaatgtcgttggactcatcatacttgaatctgttcttggtcttttatttggttgttgcgagtgtaattgctgatcttgttgttgttgaagatgttgctgttgaagtgatagtgggatagattcatttttcatcatgtacggagaagtagcattagcatagtttctattttgttgttgattttgtattatcttcctttgaatattttgatattgcatttgtccatttgggatttgatttgatggaattgattgatcaggtggaatttttccaggtggaactggaccttgtggaactggaccttgtggaactggaccttgtggaactggaccttgtggacttgaacgataattaaaattcgggctttggtttgcatgattattataaggttgttgattataattttgatttgattgactgtgtggtgaaaccccatttttagatgtaaaacttgaatttggatttatatatgaagcatttggatcggttaaataaggtgggggttgtggaccagtagaaactctttgttgttgtggtcttgcaaaatcattatcattacttgatggtattccaggagttcttacatttggaggtaaatcattgggtaattgttgaataccatgaggtgaaccttgagataatgtttgtggtggtattccttgattctgtaggagacgatgattgccttgtttcctttgattccatgcaacagatgatgcaacattttgcatttcatgtggttgataaccatgaggagtatttattggttgtccttgttgatttgggtgttgaatatgataaccaggttgctgatgttgttgattatatgcttgttgttgactataaggttgttgagggggtaattgttgtggaggtaatgaaggtccttgttgtggtccttgttgctgtggatgaggaacttgtgaatgaagaacttgttgttgagaatggtacatagcaccttgtggatgaggaacttgtggatggggaacttgttgttgctgtggttgttgttgttgttgttggtggtgtaatgaaggttgatgatgttgagaattgtacatattattttgactaaatgaactttgtaaattcatttgcattaatgaatcatgtttatcctttgttgatatcaaattataataatttgaagcattttgtgaactacctctatcagtacgagcattaaatatatcccaaaatatatgccaccattcataaataaaaccttcaggagtattcattgtcattttagattttggtaaaagaccttgctttgaattcattaattgaaatttatcaaatattttttcattattttttattacaggtacattagcttcattaagaaatgatgcagctgatgaattatatcccgattttaataagaaatcatagatataagcattaagtaattcctttgaattagcagcagcagaatctctgactactggttcattgactaaagattgattggcaatatgatttggatttgaatttgggtttgcatttgggtttaaatttgggtttgggtttgaatctgaaattccatttggattagaatttggattcaaagctggtacaggtatgctattattactattattattaacattattaacattattaacattattgcctttattaactggaacagtgttaatacttttctgattcccctgtatcagaacattattattgggcattgtattattgctattattgttgttgttattattactgttattattgctattgggagtactgttgctattattattgttattattattggaactattggaactattaggaatattacttgaattattattatttgaggtgggtacttgggaaccattctgcatcggtggctgtttcatttgctgatggttgtaattattattcttggtgtccattatgcgataatagatataccttctatgacatacacacagaaataggattatttgagataaacttttatcaagaatatattgctggtatttaaaatattaaaattatacaaatttaccacaatattattatcaatatctagcacagcatgtagttaatagtgtaaacaattttttgatgatgtttttcctcgcattgtttgtcgctttcgacgagaatttaccactctttattttattatggcattggcacggtgcccacgctgagagcttttttctcttgtttcgcaccttgcctcttctctgggtttattcctttagtgtgcatgtgggtgtagccagtggttcatatatcttggaattgtaattgttatagccactgactgttatgtgtttatccgctctccgttagtacacatattattgtatttgtatgatttatactctccactacatatctttttaaccccgataaactcccctaaatttccctagtattgtgttaaaaaggcaatcattgccttaattgggatataaaaaacggagacgcgacgttccgccggagtgccattgaaaatagtattacatttccaattacgttaagataacagatctggagatttgatacattttacaagggttttaattgtattatttagtaaattacacagaatatcaaacttgtttgactttggtgactgtctctctggtgaaaagacatcctaatactgtaattgatattatacttacaattatggcactactgtaccatgcacttgggtaaacattccatgcaaattcatgaatgaaaaccagcaccgccacggtaccaacttttaaataactatcgcttgcaccgccgcattcggataataagaatggtaatgaatgcatgtaccaacttaagaattgataatgtaaactactactgaataaaacacccattaaattactcatcatcattatcatagcaacataatagcatccatctggtccaatgataaaattgtttctattgattgtatttttgtaaaattttaaaataccgtctttaataattaaatcaattactgatttacctgtcatctttggagatacccatttattcaatgtgaatataataagtgtaaaaacgtgtaatattaaaagagttttttgaaatattggattgtggaaaacatcctcagataaaaatttccaattaatactccatttgtacatgaactctctgttaaaatcaaacgcattacgcaagaaactatctcttatctctttaccattaagtaaaaattgataattaataccaagcatcactaaaataccaaatgcaatcattgaaagaaatttaattaaattttcatcatttaagaaatataatataataaataatcctggtaaatataataaagcgttcattttaacacttaaaccaaaacaataacaatcaattgctaataatgctaaaagtttactgtgtaagttaaattcccatttttcattcttgtcatatttatcatcatatgatgattgtttatattttgacgctaattgaagtaataaaatagtacctaacataaaaaatgtagtaaaacaatcattgaataatcttaaaacataaattgaatgtaatctctttgatataactaataaataaaatacatatggtttaactttatgtttacctttaatcataatataaattaaaaatgttaaaacaaatgtcataagatataataatctaaaagcttcctgtcctgaaactaaattattcattccatctgttaataatttcatccatgaataaatgaaaacatatccacctggatacactattggtcctgtatcacctttgatattatcataatttaactcaccacgttcaatttgggtaatttgttgcatatatgtactataatcaatttctgtatatggaaccttgataatgattaattctaataacattgcctcaaggaagaacattaaaacaaacattggtgcaacaatggatgtatcaaataacattgaattgatcaattgaatgataaaatcatatcccttttgaatgaagtttctctcttcaatgaactgttctgcgggcttatcaactgtcgcctctttctctgacattgttaaatttatagtcagaaattagtcacacacaagagaaaagaaaagaaacttcaacacgaacgagtttacaagaattaattatgtgcaacgttgttatcacaattttcattttttcaatgtaacggtttttcaaaaaaaaattattacttttacaataatatacacaaaaagctataaaaacctgtatttttgtgataatagaatacattaaacagagttcttctcaataacactattagcaccttcattcccatcaaaacttttatctgaaacttcctcaaaatcatcagttaatccactaatatttcttgcaattttaatcttttcattaattacatcttcatctcttgtttcaatgaatctaatatctaaaatatttctaactttatccgtatcattaggaaataaattaactttaatcaaatcaattccaaaccctggtattaaacaagctaaaacaccaataaataaacatgcccaaaatgatggagtttgataacatcttacacctaattgataataattaagtgatgcagttgatgatgaccatgctgatgtccaaataaataacattgcatcagataaaaaatttaatccaattgtaataggttcccatcttctttgctttaataaaatgtataaattacatgcaataattgcaatatgaatagagaatgtaccaactgaaaacattgtatcaatacttaatccattcttagttgcaactataccctgtctaaatattaaccatgggaaaatgaatgatattgcactttgatacataccatcaatcatatatttaacaaatcttaatgtatccttaactgtatgattttcaatattttgtctatataattgtggtatagttaatgaaatgtaatcaggtacatcttgatccattgtacctagtgtaataacaggaattgaagtgaaaaataaattgaaaagcatcaaaaatgtatattcatacaaataagtaccatcaaaatctgtgaaaataccataccaaaataatggcataacaaaaataacatttttataaaagaaacatggaatcattgttgataatctttgaaatgaccatttaccatgaactaaaattaatctttgtaaatattcaaattgtccaattgcataatctgatgacatggcagcttgtctaccttcctcacctgcaattccaataccaacatttgcagattgaatcattgaaacatcatttgcaccatcaccaattgctaatgtaataacatctaaattttttctaactaaacttacaatatctgccttttgtgatggtgaaactctacaacataaaactgaacagcattttttaccaagcatcaaaaacttcaattgaatctgtttaacgttttcattagaatcatcaaataataatgataatgttttaccatcaattaataatgcaaatttctcatcgggtatagaatggtctaattttgcatgtttgaaatgatttggatcatttggattatcaatttggaaaacattagttaaatatgagtctacagctttttcaatatcttcaattgaatcacattcaattcttaacagctccatattattatttaacattgaacatgaatatccaatacttattgcagtctcaactttatcacctgtaagaacccacagtttgataccagcttttcttaaactttcgattgtacttggaacattattttgtaatttatcatcaatagcagttgcaccaattaatttaacgtttctttctaatttatcagctaatacatccatttgaatttcacgctgctcatcaattaatttacttgcttttaaatattccaaattccattgattaaaatcattttcactaatttctttaaatgaaatacaaagtgttcttaaaccttcatttgaatattcatttatattgttcttgattgatacatcatgttcattaggaatgcatctatcaataatgatgttatcagcacctttcatatacattattattttaccatcaggagttttaacaacaattgacattctctttctagctgaagtgaaaggaataatgcataaaattttgtatctgatttctttaccattatcaaaaactaaatattcatcatcttctttacctaaataaacaatccccatatctcttgcaaatgaaactaaggaaatttcatcaggtgattcagcactataatttaaaacagtttcatcgtcaacatcttcaatatcttcatattcaataactgctgaatgacaaagtgctaaagataataagaaatcgtgtatctcattatttgaatagtcatctaaaaattccttagagacaaaagttaatttatcctttttaaagaatggatttataggtgataaataatcacacattagttgaaattctttacttataagatctctcatataaagtatcttttcatggatattaacattacctaatcttctatcataaccttcctgtgcagaagtataagctaacccgtaagatttatcaccgattgcacattttttgaattccataatattctgtgttaatgtacctgttttgtcactgaaaatatattcaatttgacctaaatcatcagatatcccccaagattttggcatacaagggaaatccaatttttcataatacattttgacatctgaataaatgaaaaatgcatgaactgttttaataatttcaattgtgatatatagggaaattggaactaatgtttgatacatgattaaattaacaaaaaatgataatgtaccattagctgcaggagttggagcataaggtttgtattcaaagaatcttcttgaattaaactcttttctatagaataaaccattgattaaacctgaaacaaaacaaaggataaataaaagcatgaaatttataatgacaaaataatttaaatcttttgaaattttagattttttagttggtgtagttcctgaattaagcataattttagtttctggaccagttgcaatagtaatacacaaaacgtaatttgtatttcttagaactgaacctcttaataaaacattattgattgtaacggattcagaggtaactttttctagaccattgatatcttcatcatgaacaacaccatgaaatgaatataaatctttatttggtaattcagtttctaatgagaattttaattgggatatatctgataatttctgaatcttctttgacgagaactccattgcagttttagttttcaaattagtttcaccatcaagatttttagtctcaatataacaaatatttttctcattacttgatttcaaaagaatgcaatctgctggtatttcttcatttttacgaactcttattatatcaccaactaaaatacttttccattgggttgttctaaattttaaaggataatttttagaatttgttgaattaaaagtgttaatacgacttaaattatttgatctcaaagtaaaaagatctaaactttcattatcaatgatattaccattggcatcattaacgtttttattcttctttttgaaaatatttataaaatttctaaaagttttagttgatgattttttaaattttctccaaagtccgatattatcaataactgcattattattatctataccaaataatttatggacttttgaagaattcaattcataatcagagatagcacgtctataatcttcaaatgcatctttgaaggcagttagaacgacaataacgataagtgggacagcttgcattccaggggactgaactccaaaaatttgaaaacaacctaaaataataatgaataagaaataagagttggcaatattagtgaattgaaagaatatattcattggtatgaaattcaatggagtatatttagttgttctaattttatttgtttgataaataattttattttcatttgtctttggatcaatgaattcattcggtaatgattgattaaagaatattttacgagaatctatctcctttgcatcattagcatgtcttttattataccatttttgaaatgtagagttgtataccctttgcaggaatgatctgacatcttcctctacagttttcatgatatttcgaaatgttttgatgaatgtggctgagactttgaatagattatattaatgatcacaatgattgataaataggtattaatgatagtacaaaaatgaaattgttgtacagtaaagtgatatgtacctaatacttgcccttgtaatataaaatagtgtacacttgcacacttgctgtctgttcaaagatgtaatcaaacaagaagcagttgcactcaggatacggcatgtcaaactgtaaaacaataaaaatttcattttcttctatcaaagagagcggttttgtttacataatgaaaattttattttttttacactatatgtatgatagatgttatgacagtatatttgttgtggtgtttatagatttattatgttattattggttgttttgtgggggttatgggatattgaatgtgatttataatgtctatgtagtgtgctgattatgtggattgtaatatatggtaaaaaatagagttaaaaatgtaaaaattgttaatttttcaagatatttttgtttaaagcatgtaaatttaaaaaatcaattactataatttactaactacttgctacaaaatgtgttctttatgacaatataactacatttatacaatctacagcatctaaccttctatagaacactaccaaatactcatataaccagttataaaacctgcaagcccaacatacaaagtaaaccatctcacacaatgcagcgtaacccttatatttcccaatgcggactcgacgttttccattttctcacacttggaggaagtcgttgaaaatttcacaatgaaagataatagtgtgttggagacgtctttctttcttgaattgtttcattaaacacacaaatttacatacaaaatgtctattgaagaaatcccagaaggttccgaagttaccattattccaaaggctgaaaagaaggctagagaagctttattaaaattaggtttaaagcaattaaaggatatttcaagagttacctttagaagaaagaataacactatcttagcaattgaaaaaccagaagtttacaagacttcaggtggttcttatattatctttggtgaagcacaagttgaagatttaactaagagatatcaagaagctatggcagctcaacaagctgcaagtgaagttaatgatgcaattaatgctccaaagggtgatgatttagctgcttcaattcaagatgatttaaagaaagcttcacttgaagataaaccagaatctgctgatgctgatgatgatgaacctcaagatgctactggtcttgaagaatctgatattaccgttattatggaacaaactaatacttcaagaaacaaggctattaaagctcttaaggaacacgatggtgatatcgttaatgcaattatgtctctttcttagattagtttagattaattcttataaaatatagttaattaaaatagtttatataatataatcaataataataatcatttactattactttcatccttattctctttaatatcttctttgatattctccttattatcatcattgttttccatttcttcaactttttcatcattgttattcataaatccacatttaggacaaacatacttgatttctttagctgatttacctggagctgcaagtccattatgttgaaaacaattactacaaattaatgcatatcttttatcaggactcaattcattctctcctaataatgaggtcattaacatatcataaaatcctgtattgttgttactttgatgttttaaatcttcaattatcttatttttatcaccactttgaatcatttttaaatattctgctttcttttgttgaatttcatttgcttctttctccaattgttttaaatcttcaccatcagaaaatctagctaacagatccttagttttgttaaaattggttttctcctttagtgtagatagtttctcactatgttgttcttttaaatactcaatataactttccttgttattgattaaataattgtaaaatgttaaaaatgaataataaattaatccaaatataacgggtattaatatcaaataaaacatattcattgattcaaatattttacccatcttatagagataactaaaatatatcacatacccagaagtaaggtatataggaattaacctcccatagtatttcttttgtgattttaaatttcttaattttttttcattactggttattttgaaagttattttcattaactcattttcaaattgtgttggatcaaatgctttagatttaaataagaacattggcgtattcactaatgtggaagaattgaacaaaaaaaaaaagatcaaggagtcaaggctttggcattaaagttaaaggttaattatgatagaaaaaaattatcacacttaagcgctctaagatctgtttgacataattgtacgttactgatagatcaaatctgctagattcaccccagtttaattaatctattcatttaaatttaatatttttatacaagtgctaaacaataattcaataatatactctatttcattaatttatctcttttttccaattcattaataacattttttaaactttccattatttcagttttctttatttgagtttcttcaaatgttttaatatgttcatttaatttattacctagaaatattgttgtattatcaatatataatcttaattgttcaatataccaatctttaaattcagttattattgatattattttcttatgtgatgtgtttaatgtaacagctaatgttaatgcagtaaatgcaaacgcactatttagtgtaatcaaatcataaatatatccaatgttggaaaggataaaaatagtgaatggtgcagcaattatttcattgatgatatatttatttatcttggattggacttcaggtaatttttcgttagctattttaccttgtaagttagataaatagtcgttaacattttccttggtttgttccttaatttgaatagattctgggaataatgtatctattctaccttctaaataatgtgatttggaacttgcttcatttaatgtaccataacattcaatttcttcaccaaataggctagtctttaccttagctcttgtaccatttaataaattcgatataaccaatgtcaaatcacccgaattataaattaattgtgttatcttagtaaaatctttaagtagtacattctctagaaatggtgtaactttactttgtaattcaaaatgtgcatgctgtgaccattccttaatttcatcctttaattgaactgcagttttaatgtccgatgatgaatctaaatgtagttcctttagtaatccacgaagtaatagaattaatggtttatatcccgatgtttctctattaattgtaaataataattcattaatattagatttttgataaagtttcaaatattcactaacgttatttatatcattcataatcattgaatttgctgaatttatcttatctaaatcaacttcaaatgtatcttcaggtaatgattcctttatagatgtacctatatctaatgatgaatcttcaattttggtatttataatatttaaatatggtatatcattgatttttgttactttaccatcacttgataaaatattcacccataattgaatatcactttctttaatttgattatcctttggattggaatttaaatcaagtgtttcagccccttcaagtttaatatgttgactgaaagttgaatcatttacttccacaaatgataaattattaaaaaaatcacgattcagtaatttactagttccatcaccaagtttagcatcttgaattaatcttgtttcactattgaaaattggtgatttacatttaaatatcccacctccaatagattcattcttatcattatcaaatataactttcagattggaattaggatgtgatttacgatatgagcgtagtatatcgggatatgtatgatcattagataatggatcagcagttaatgcatcgacaaataatccaggttttaattcttttgattgattgatacctaatgtaattgtattcggttcaaatgtatcagtatctaggtttggtatgataggttttatagtgtcaattcttttagttattgttgaattttctttaaaatataatttacaatcattaagaagatcatttattgaagtgttattggttgttgaattgaatcgttttaattgatggatgtttgaatttttcaataaagttcttgagtatctagtactcattaatctctgcattgatgtgattaagtggttatctgatctgatatatcacttttgtaaaaacaattccattaactaagagaattttgaccataattaaaaattactactactaaatgtacattgcgagaggaatttgtaaaaacactgcacaggttcgaatactgaatacagagtttagtagataagatgtttgttagttactaactatttacctatgcaaggttagtttgcaagattcacaaaactgttttctttatgtttcgaattttctatccaatataatctagcaataatttacttgttaacccctcttcaagtttactcaatatatcatggacttaggtatacagtgaaaaacggatgattatcaaatcagatcatttagtaatgccttataccaaaagaggggaacggttaccatacaccaatagatacacgtacattgacgtgatttagagaaatcactagataatcaaaaagaaacatcatcgatcccaaccccaacgggagatcaaccaccgatctcccctgaaaaattattatataagcgaagatttcaacttctgttgatgtcaaattaatttgaatcaacatgtcaatttgatttaatttacttgatctttagacaagaaacatattattaatatgaatgtacaagtactgaaaagacaattttcatttgcaagagtactaagaagtcaccaaaatccacttgtaagtatgaaagagtgattactattgtttaattacacgattaaacaaacttattgaaaataaatgaaaaaaaatacaatactaacatgaattttgattattaccaatagggtttaccaaaatttaaaactccaaacacaaaacttccagtgaaacattccttaccaaatgtacgcaagattttattagtatcttcaggtaaaggtggtgttggtaaatcaacagtttcaacaaatttagcaattgcacttcgaaattcagatttaaatgtagggttattagatgctgatatttttggtccaagtatacctaaactaatgaatcttaagggggaaccaagaatatctgatactggtaaattgattccaatgagaaattatggtattcaaacaatgtcaatgggttatttaattccaaatgaaaatagtcctattgtatggagaggattaattctccaaaaagctttacaacaattactttttgatgttcaatgggataatttagatgttttagtaattgatttaccaccaggaactggtgatgttcaattaacattaagtcaattattaaaagttgatggtgcagtaattgtttcaacaagtcaagatcttgcccttttagatgttaaaaagggtatctctatgtttcaaaaagttgatattccaatacttggacttgtggagaatatgtcagtatttatatgtccaaattgtaaccatcaagaacatttatttggtaaagaaggtgctctattagaagctgaaaaattagatattacacatttaacatcagttccactcaatcgtgaaatctgtaaacgtagtgatgaaggattcccaattgcgttggataaaggatccaagatggcagccccttactacgagatggctaagaagttgaaaaacagtctagaattgtgagattaatattaggaaatgaataattacccgattgggaaggaggaataaaattttggagagcaaagttagcaaaaaggggagcagatttcatttacatagctgatcagtggaaatagggttctattccacttgttgccctttatctgatacttcatttatgttgttactctgtgttattgacttttctttactgcttgtttctctttcctgtttgttcttctagaatcacccacatttgctctagcttcgtgtgttctattaaaaaaacattaatttatctttgctgtacatttatttaactgtaactgcaataaaaaacattcacattaactacaaaacaaaataaaaaatattatttaataatgaagttatctatgaaccttttaatctcttgtcttttagctcctgcttttgcacaatcattaccatattctgattttgattctagtcttgactcaaatcaaattcactctaatcatgttgccgctcatggtatctttagatctattttgagtaatagagattttggtgctccagttgttatatttagtgaatggctttcaccaaatggtgaaatttatgttgttccttcaacaaatgatgatactgaatctgaccaaatgcctgctatgggtttaggttataaatttgttaataatgataattcaattgttcaatcattggatatttctaatgttgctgaaattaaggaagaaaatattttagctcaaggtttccctttcggttggaagaaacatgaaaaggaaactgctgaagattttttcccttttggttctaaaaagtttatgatgatcggtcttaataaaagctcatttgattcaagtgctgatgctattgaaaatactgatgatcattataacatgggaagtgaagatttagattatattaaagaatataatggttatgtaagtaactccggattacttaaatggtttaaggaagaagaagaagaagatgattgtaatgctgatggtagaacaaataaattatttgatactgatcatttcttatttgttggcgttggtagtattgatatggaacttccacaaaatgcttattctgatattgtttacaaaagggacacagaatcaatcaaagtaattacttattatactactacaactgttacatcaactcatggtgttacaattactcatactgatcatcctgaaccaacaaatcattataaggaacatgttgaaccaactgagttaccatcaacaactgattttgacaccacacttcaaacaacaacacacgttccttttattttctccacttcaaaggatgatgagattttagaagagacaccaactccaactgttacagaacctgttcctgatgttacttatacggaaaccttaactgaaacagaaaagacaccatgtgaatcttctactacaacatatgaacatcttgttccacctcctgaaactacatcagttccagaaactgagtatgaaactacagaggcatcatctagtgaaataattgaaactacaacatcagactggacagttccagaaacttggaactcctatccatttacaacaactgaaactaattttggaccagtttattcatcacacccaatttacatgaatactactactactgctgatatttcaacaatagactcaacaacttattcaacctttaatcaattccatacttcattatatggtaatgatacagataaggttaacaatggtactaagccatcagaaggatcaatttttactagaaccagaatgagtaatatgactactaatgttaccacatccgaaaatgctggtaatggcgaacatgcttacttaggctctttatgtggtttaatctttgtttttgtttctggtatcatcttgatctagtggaaaaattaattaggttgaacattgtcttgtatttttatttgtatttatactagtttttcgaatttttttgtagtttttatcagctttagttttaattattcatagtttacacaaaatcaatataatacacacctagtgatttataatcattcttgtaatgcatttagtctttgtctcatatttaggatcaaatcatcatcatcatcttcctcttcaatttcttgacctgaaggttgttcagtttcaacttgagtatcattcttaacattatcaacttcagaggcatttttagttttatcacctagtatatctgttaataatgtatcaatttcttcattttcatctaaatcttcatcttcccaagccatatcatctaatgcatcatcaaccatttcatcaattataccagatttcattaattctttagataattcttgaacagttttactcatttgaggtaatctaaccaattgattcatatcttgcattataccagttgatttttgtaatgaaccctttaatttaattaactgttgttgctcatttaatttaaattctattgaatctaaagttgctctagaaatatgcattctttcattaactttttgagtatttcgtaattcttttgcatataatcttgcagatttcatatcattcttctttgctgcttgctttattaatgatttactctttttttcaacattatttaaatcttgtatttgtctatcaacttgtctcttgttttttcgtaatgtttgctgacatttacgatattgttcctttggatcaggtccccagattgctttctttacaaaatccatatttctgtaacttattgttgtttctaccctatttcaaaccttacttttgagtttaaacgttatgtattaatccacaatactagttataaattcttatcaatgtgacattaagtaatttaaatttatcctgttcaatctgaagccaaagataccataataagacgacccatcgacgcaaatagagccaactaaaaacttcaaattttcattgcattgcaacgcgtcaaattcaatattttaaaaaaaattgcttttaaggacgcgtgatgtttcaccgtatattataatagaaagttgaagtggaattcaattagtgaattttaatgtacttcatttttccttttctttcctgatattttttatttttacttaaacaatcaaacacatacacatacatatatcatacaatgttagaaggtaaatttgaccaagcatcattattaaaaaaagtatgtattaaagtttatttcaagtttttcgtatagcttctattttccagtaatttgaacaagaaatactaacatgacatcacaaaatttacttatattatagattattgactctattaaagactcagttaaactttgtaactttaactgtactgaagcagatggtatcacagttcaagcaattgacgattccagagttcttttaattgcattaaagatggatccaggttgtttccaagaattcagatgtgatagagatttagtcttaggtttagatttagaatctttaggtaaaatcttaaagcaaggtaataatgaagattacttaactttaattgcagaagatagtccagattctttacttgttgtttttgaagataaaaagaaagatagaatttcagaattttctcttaaattaatggatatcgattccgatgttttaactattgatgatatggataatgattgttcattgaccatgccatcctctgaatttgctaaaattgctagggacttcaaaaccatgagtgaatctttacaaatcgtagtgacaaaggaatctgttaaatttaaggctgaaggtcaaattggttcaggtaatgttatctttaaaccacatactgatcttgataatccagaagaaagtattaaaattgatgttaatagcccggtaaatttaacttttggtgctaaatatttaaacgatatcgtcaaggccgcatctttatcatcaactattacaatgaaattaacagacaaagcacctgcattatttgaatttaaattaccaagtgggtatttaagatactacttagctccaaagtttgaagatgaagaatagtcggcgcaaattcatagatcatagaataataatatgtaccaccctttgtaaagtatttaatttaagaaaaaccggaaaaaaaatgaattaacgatacatccactgataaaataatattattgatttctataaaggatattatttccaaatacttacttctaatatacagcttctttaggattctcaagctgaggtagctgagatgagcatatcgttgagttttcagttattggtaaaactaatctatatgcatcatgcctattcatataatatctgaataaacgtttaactctgataaacccaaaattttcatataatcttaaagcttttgaattcatcacttcagtttctagagatatttcatcacacccatatttttcaatcattaaactaatggccttttcaataagtgttttagcaataccaagccccctatattcatcatcaactgatagcattccaatatatcctctcacacgagcatttctatgtggctcgactttacatattatattaccaacaagtttgtctttatgatgcgccaatagagttaattctggccaattatttatgaaaaatcgataaacaaaaattgagtatggttcactcaaatgatggttggtcatagcttccacatctgctatttcctgatctatgacctctctgcttcttagagatgtatccaatgagacacttctgaattctatatcatctacggtcaccattaccaacaaaataagttctgaatcaaaattatatatcggtaatccagttgatttgaattgtgacttgtcacaataaaaagttccaaacattctcacatcttcaaaaaatttattgcgtcggctcagtaccttttctctaattttatgtaagacttcttatagtttatcaggtggcaaagggacttgattttgattttgttaatatctacttataatatcaatttctaacccaggaatcaacacaaatacaatgacagattcttttcaccagatgggtaaagggatcctgccacacaacatggtttctacctttttaaagggctcaactgtgtttgattcaaaatttgaacagaaacccgataagaatatgataactgtatacaatgcattcaatggattacaattgagtgtaccgtacgacttttgcaataatctggaaggtttgaaaaaatatattgcagaactgtttcatattgatcctgaatggttatttctgttaacaccattcggtataaaactcaaatactctatgataacgaatcaacaagttacagaattgtatgcctttgatagaaagtttttcaatccaggactgttaaataaagacagagaggataaaattttgaaggatttgataaactcattagataatgaagatctgatttccatggtgaaacctagagattcacctataggtaacacatcaaccgaaattaacaaattcatagattcattcttggaaccaaataataaacatataagttccattgatttagatttcgataagttaagattgtgtttgaattcacttaaaaggaactccggctggacttctgctttactatctgatatgaaaagtacatttgcaaataatttataccaccagaactacttgattattgaacatataatagaatcaattaatatattggtccaatatatatccaatatgaaaaatgatataaccaaggaaatgaacacaatattcgatatatttaaaaaattgagcagtgagtctttagttagtaaatgggaagacgcctttcaattgcttcagaaagttactatatcatatgttaaccaaaccaaccagaggacaatgcagttgactctatcaaacctaatgaactttaacaaacttgaaaaatctgcagctaagtccaaagcattgacgaaaaagataagctcatttcttgaagaacttaatactataatacaagatcacatcgatgaggaaattagaggcatcattgatacctatcaaaactttgcaaactcttatttaaaaccagaatgggaattgagtgaaagtggtaatattaaacgggccaatcaactatatgaaacactagaatcgattataggtgatatgtccaatgaaatgaacaatataccatcttttgaacaaatgataattacaactgacgaaatgtccacaaatttatctgatggttccataaatagaatactacaactgattgaaatttatcaacgccaagaactagaatatgttcctaagattacaaagattgcaaatgatctatatgatatacaaagtaagtattatactatgcgtcaggaattacaaacgaatataataaagggtccattgattagtgttgtgaatgtacaattaatggtacgtgaagcttcaaatttgattaacaatgaaatcttaataaatattgaaaatatgcaagaagaagaactgattttatcaagtgttgtggatttaccattgaattttggaatctggatggtttctgtaatacacaacaaagagtatggaaaatcaattgatgaaataattttacaaactaaccgaatattagaaaatttaaagtctactgaaagtgctagtagaagtaaatggattgaagaatttatcaaagatagagagattgggaaatttgaacttgattatttaactgattcagagaaaaagaagtttgttaattatggactttttgagtatcaaattaacagggcaagtgaaaataagtccaataaccgtgttagttacttaacaccaataaataaatttctccaaaatatgaaaggaaaagaggatgggtttggagggatcaatgatatcacaagttataacggtcgtgaattgaatgatccaattactgatgttaaaactcaattttttataagattcatccaagatataaatattgatactgcgctatcttacataaatcaactaaaaagacaaggctataattcagaaagtatttcacaattgaatgatttaattgttgatgataataccgcatctgagtattataataaaaatctttttaaatttttaaaaggttacgagactaaagatatcaaggtggtgaaaaataaagaaatgaaaaatgaagtagctgaaagtgaaaagataaaagcatataaacttcggatacaaaggttagaaaaacagttgcacgaaaagaagtttaaaaaatttcagtataaatggtctgaattgggaactgatgattacacaacagaagaaattgaaaattatgcaaaccaagaaaaatataccaataaaaatgttaaattaccgcctagtcattatctagagaaaatgaaaagacttgaagaagaaaatgtagctcatgttcagaagataggagagttagaaaagctgaaagatattgaggaaatgataaatataagaagaatattagaaacaaaaaacaaagaaattgacaaactaaagactgatgcaaaggttaaaaatgaaagtattgaaatgctgaaaattgagattgaaaacattaattcacaaaatgcaaaacttattgaagaaaagaaagccggggagcttaagttagaaaacttggagaagtttaataaagaattacttgaaaacatggcaaacaaagaaggtgaaataatgattgaaaatcaaatgaatcaaaagaagaagaatgatttggaaatgagaatagaggagttggttgaagtaaatagccaatatgaaaagattgtctataaaattgaagatattgaaaagatcattaaagatgtgttcattattttgatgaacttcattggtaaactaaatagtatgagtaaaatcctatatgaagacatgaataacttttgtttgatccttgaaatgatggggttattacttgtgcaaaatgaatctggtaattatgaaattcaaagagtcaaaggtttaagaggaagtaaaaggaagataattggtgctgatgatgataatgataaagaaaacgtcatggatgatgaaaaattgtttattcaagttattgcaactgatatagtgaataaatgtaatgttgaatggattgaaaaggaaattaatgatgggaaatggtctgttgacaagaagattaatcttgaacaggttactgaaaatataggtgatttaaaatatgtcaaacttgatgatattgatgatagtattgaaagtattgatttgtttaataaccaaatccgaagtattgttgaacaatatgatagtcataaaactgacgaaaattacaaaacctttattgattctattaaaatagaaccagaaatgatgttagtaagtattcataagagatttgaagatgttgaatcattagctagaaaactacaacgtgaaaaggtacaattgaaaaacgaagttaagagacttaccaaaaagaactctcaacaattagttatcaataaatttgaaaagggtgatttagtattgtttttacggacttcaattggcacagattcaaatatcggaggtgaacaaccatgggctattttcaatatgggatcacctaactattatcttcgaaatggtaacgataagttaaaagaaaaggaatggtttgttggtaggattttacataaggaacgccgggtggctggtgaagatgagaatccattcaatttgaattccggagtggtgtggtattgggtggatgttgaagagtaagtgaatcgattgtattcaatcacgataactctaggccaagtcaatgtattttggtgttacatgtatccatgcggaggaacggagtcaagaaagccagaccgtgacttctccactataatttttattccttatctttttgcatgtgtaactctgtaagttaatgtttatacctactgttgtgctattctttatgcaatggacgttataagtcatacagaggaagaaatcgaagaagacaacgatttccagaagtgtgtttcagcctatttgtatggtgatgaacaatttaatgatgaatatcataatcagttttgtgtacagtttacggacatcgcagatcaactatttgcattgaaactagacacatatcagtgtgaagtgcaaaaatacacagtgaagaaaggtataaatgttccagatatggtagatttactatgtgttcttcacttactttgtttacagggaccatcatcaactatagaactgggtaacaactgtttccagttagaggttttacggacaattattagcgaatccgattggctggaaatggcacttattgtcaaacgcggccttcttagaagaggaggctcagtagtttacttatcaccaatgtttagatattatggtgatctttatcccctggatctctcaaagacaacaaaaataacatgaaagctcttgcacatattagtaatattgatattgatattccattatacgcaaatagagtggttgcatttggaagaggtgatggtgggaatctaaaaaatggaaaacatttaccaagagtacaaagaattgttatagatgatatgcgtctatctgcaacacatttttatatatggatagtacaatttgattctacactagatggtgtttgttatatacaagatgtttcaaaaaatggtacctatgttaatggtgataaagttggtaatggtagatacactattttacgtcatggtgattgtatttcaattggtgacacagttttcgaatttgaacttgttggaggtgtgaagaaaaccgaagtatgcaagagagtcggtcattggagtattttagatgatgttattggtattggcacatttggacaagtaagtattacaattaaaaatgttttttaatgttcagttgctgagcctccaaaagaattttttttactaacattatcaatctatcttgattatttttacaggttcaaattgcaataaataacaaagataaggggtattatgcagttaaacgtatcaaaaaaagcacaaataaaggagttgatgctgaatattcattattacgtcgtttaaaacatgaaaatattgtgaaggtaactgatgatacggcaatagaaaattgtatatttcaagaattagcaattggtggtgatcttttctcatatttatcacaagagggatgcgacgaaggatcaacattacatggattacctgaaccggaagcaatttttgcacttttccaaatatgtcaaggattattatatcttcataaaaatggtattgttcatcgtgatttaaaattagataatatttttgttatgggggctccaataagttatccacgtttagcgattggagattttggtattgcaagagatattaaagaatgtcatggtagaatgaaaacaatggttggaacagctgaatatgcagcacctgaaattctattacctagagaaaatagtaaattagaagataataatttcgcaacttcaataacttccattacagccaaaacatacacatctaaggtagatgtttggtcagttggtgtaattgcacatattttattcactggtatttcaccattctatggatcaacactcgatgaaatgcgggatcgaactgagagaggtgttggaagtttaaccaattgggcaactgatacatcaccaacgggacaagaatttgttaaagagaccttagctgttgatgccaataagagaccaagtgttgagcagatggtccatcataaagttttcgataatggtggaagatcagttatcatggcacggatcaaacggaaagtttagctccaccagaatgtacggaaacaccaagttttgcgttgtttttcttcttctttaaagttctgtatggatcatctccttcttgatattttttatattatccctcactctataatattataaaactttgctactactactactactactatatatctactgatataaaatgcaactaccggtaaatatatttatccctaacgtactcataacccagagttaaagtaatccaaagtaaaatcccacaggtataatagtaagaccgccatacacgtaaaaaaaaagatcggaaagtccggttgttggttccactgcaaaaattatatttaaatcctcgctccttgccttcacacatttaagcgggttggataggctttctttcatgaattaaatcctcgttcagttccgtgtcctctatagagtatatctctcttttcttttctcttcctttcataacactttgacctgatttaattatcaacaagttatttgagagaaggccacctatttcactctcacatataccatttttgtttacttggttttaacttatactaataccattcattttgcttttctagtttgtttttttgcttacgctacttatacacaaattcacatcaccttatacaaaaagagtcccactttttaacgtgttttagtttttgagttttttctacaattttaataattaatagctgatacatttacatcagccgactattgtttataccttaaaaggaatcaaaaactacatccttttcttacatctctgaatcatcaaccggatcgcttacaattcttgtgacgtgaaaaaaaaaaatttttaaaacttaaaatccgaacctgtcaatttataagcgaaattttcatattccgatcacaattttttttcagatcaaatactataattactaaaagctcgtatttcaagataatttatcaaatattcatattttataatatcatttcaacactcatataaaaaaatgaatactactagttcatttgaatctacaacatccttaaatggtcaaatcccacaattatggatgggggagttagatcaaagatgggatgagttaactatcaaacaaatatggaataatcttttaaatccgctcggtatagttattcattcaattaagcttattaaagataaacaaagtactattctaggtttagcaaatgctggttattgctttattagattccataactttgatgatgctactaaagttctgaataccttcaatggcaaagttattcctaatactaataacttacattattttagattaaattggtcatcagctaatattcaagcagctgccaattctattgtttcaaatactaccattccaaccaccaaccaacctttggaatattccatctttgtaggtgatctgcctcaaaatattaatgaaaatatccttttacaaactttcaaatcaaaatatccttcatgtacaaatgttaaaataatgattgatcaaacaactggtaatattaaaggttatgggtttgtaaaattcctcaatgaagaagaacaacaaagagctttggttgaaatgcaaggttatgttttacttggtagagcaatcagagtttcaactgcgtcaaaatccaacaatactaataataatactgttactaataatagcaacaatagtatatctaatgctatcagttcaccaccacgttcaatctctccagctgtatcattaccattatcaacagaatcatcatcagttaaccttaacctaactcaaccattaccacaaagtactccattacaatatttcaatgatccatcaaatacaactgttttcattggtggtttaaatattccatttactgaaaagcaaatgtttgatttattttctaaatttggtagcattagttatgttaaaataccacaaggtaaaaactgtggatttgttcagtattttttaagacaaagtgctgaaatggcaattattgaaatgcaaggttatgatattgggggcggttgtaaaataagagttagttggggtgcaaaagctgctcaaagaagttggtttgctagacaattacaaatgcaacaacttgaagatcaacaatcaaatcaatttaacccacaagctcaagttcaagtacaatcacatgctcaagctcaagttcaagctcaacaagcagcacaattacaagcacaggcacaagctcaagcacaggttcaattacaagcacaacttcaaacccaattacaatctcaacttcaattacaacaacatcaacaacatcagtcattgttaggattagatttttcaaatagtgatattaatacactgctcaatatgtctaaaaatcaaaatatgagtaataatttaggtctttatgattcatttgataatagtggtattattaataataataacaaaaactatagtactacaacaggatttcaaaatgatttaattccatttaattcaatgaatatgggtatgaataattatccaaatgatgaattaaaattgaataaattattaattgcagctcgtgatggtaatctagatcaattagaacttggctcaaacttatacaattaaatttatttatgctgttaattatttcacacacaaacatattttaaaataatattaacttatcctttattgtttttttcacctttcagttatttttttgcacatacaaatatatacatacaacacacacattacatgattttttacattccatttcacattttgtcatttgttatttttgctctttatactatacatttattatgctattttaccaaaattttatgattatgatgcatttatcaatttaatatacttttttgaaataatttcaaatttgttttattttatcctttatcttaatttaatttattttttcatctttccatttccatttctatttcttcacattctctattcatctagctttttaatttatttatttataaactaaactaaactttaaacataaatttaataaactgttatccacggtgctaaaatcgacgcaatcgaccctaacaatgctgattgccagtttctcacttaacagaatattgataatacgaaaaaagaaaaaagaggattctccgttaccgcaccttaaacgggccgaagaggctgatgcccataaaaatgacactattgccctctattttgacacattgccgtttgcgatgtgacgtaaaaaaatttttttattggtggcttggcagtttagtcacattaaaattgaagtactgtgatggaaaattttactaagtcattgggcattaactgcattttatatggcatttactattttaagtattatcaacggaaggattcatggctttgttctctatatctggacaaatggaccttaatcattctttgcgggggatgcgatagtgttaagaatgtaatgacacatcagtgtaagatatgtaagtttattaaagtttattataaaagtatcaagctatccgtgtgactttcataaatgctgattttctgctctgggacggaaacttatctttcgttttctttctgtttaatatttcttcttttaataattttttattccttatcatttattaaaaaataatttactaaaaaacaataaaaatgaagtcagaagtacagccatcaacaagtggtgactatgaattaagtactacattaccaatgatgtcaactgaaataaatgactcaaaaacaaaaccaactataagttatgaagatagtatagttgatagtaaagaagattacaatataaacaatccaaatccagctgaaactaataacaatagaggtttctttggtaattttatagattcattcaaaccaattgaacttgaagaacttgatgaaaacttaactgatttggaaagagcaaatatacttgcttcaagagctccattacaaagaagtttaaaaaatagacacatccaaatgattgctattggaggtgcaattggtacaggtttattcgttggttctggtaccgctttacatgaaggtggtccggccagtttggttatttgttattcattaattggtactatgattttttgtactgttcaagcattaggtgaattagctgttgcattccctgttgcaggttctttcctttctctgaactcaagatttattgcaccatggtggggttttgtgatagcatataattatgcattacaatgggttattgttatgcctttagaattagttgcagctgctttaacaataaattattgggatgataaaattaattcagctgcttgggtttcgatattttatttcttgattgttttcattaatgtttttggtgttaaaggttatggtgaagcagaatttatattctctcttattaaagttttagcagttattggtttcatcattttaggtattattcttaactgtggtggaggaccagtcggtggatatattggaggtagatactggcatgatccaggtgctttcaatcatggttttaaaggtttatgtggtgttttcgttacagcagcattttcattctcaggtactgaattagttggtttaacatcagcagaaactgaaaacccaagaaagacattaccatctgcaactaaacaagttttctggagaattacattattttatttaatttcattaattttagttggtttattagttccatataatgatccaagattattaggtagtggatcatcagatgcagcagcctcaccatttgttattgcaattagaaatgcaggtatttcaggtttaccatcagttatgaatgcagttattttaattgcagttttatcagttgcaaattcagcagttttcgcatgttcaagaactattgcatcattagcagatcaaggttatgcaccaaaaatttgtggttatattgatagaagaggtagaccaatggttggagttgcgatttcatttttagttggtttattatgttatttagcagcatcaccaaaacatggagttgcatttgcatggatgatggcaatttcaggtttatcatcaattttcacttggggttcaatttgttttgcacatgttagattcagattagcattagcaaagcaaggtagaaataccgatgaattaacatttaaatcaatgtcaggtatttatggatcaatctggggtgcatcattaaatttcttaattttaattgcacaattttgggtttcattattcccaactaataaagcagatgcatataatttctttcaaaattatcttaatgcagttgttttagttttttttgcattttgtttcttcgtttggaaaaaatttaaaatccaattattaactccattagaagatatggatttagatactggacgtcgtgttgaagattgggatttattaaagcaagaaattgcagaagagaaagcatatattgcatctcgtccattctattaccgtgtttacaaggcatggtgttagatttactattagttatatatatggtacagtatattttgtgtaatctacttaaatatgaagtgaaaaaaaaggtttattgatatattaataaaagaaaggtcaaaatcatgtaacggaaatagagagcgtctttccgacagtgtaaaatttagaagttgaaaatttaaagagaccggggccgaatcgcgaatttgcagagagtaatcacataaggaagacttcctattagacagttttatttggtatatttaccactgctggtagggtttacactacttctttatcaatcaatcaatcaatctacaatgcttgcacgtaacacattctcacgtctaggtcttggtctcggtgtcagatcaccaatcgcttctttcagtagatccattttcactgttaaggcaactccagctgaagaaaattcaatccttgttgctcaaagaaagaatagaccagtttctccacatttacaaatctacgaaaagcaacttacagctgttttttcagctcttcatagaattacaggtgttggtcttgctgttggtttctatgctgttactgtttcatatgctgcaggtatagttgattctgcatctcttctttcattatattcatcaattccagttgctggtcaatatgctcttaaggcacttgcatcattcccatttgcatttcatgcttggaatggtgttagacatttaatctgggatgctggttatgaagctaacattaaaggtgtttacagaactggttatgccgttctcggtttaactgtagtctctgctttagcacttttatttgcttaattttgttgaaaattaattgatcatcattattatttattacactattactgattaagtatttgatttataaattatagttagtactactatctctcaatatcattattatctattcgtaaattgcactatgaacattataattgttgaagtaattttttcaaacaattacgtaacaaatgttataaatttgcgtttaagccatctgataataaagggtgcaagtcatggatggaataccacacacccctcttcttcttgttgaataatgggatttttaggtaagaagtggaacgaattggtgtacacacttacatcgaatgatagatacgctggttatcattcctctaaagcacttaaatctttagatgattctaataatattcctaaaaaacatgagataagtcattataatgataataataataatgatgatgatgataatgaatatgcggacgatgatgatgatgatgatatcgatgatattgaattagagaaaaactttaaaaaaaatcatactgttgaagaacgtcaacaagctcaattagttttagattcttggcatataattgaagatgttattaatgtagatttaccaaatttccaaatatcaaatgatgctgatataatagatgatatacccgatgcaagtgattttattaactcattatcaagtccttgtactcctaaagatttaaatgttgctcaaaaacatttaggtgttcagttaccttatcctgttatacaatcatttttaattcatgatggtcaagagatacccccttccatgtcaactaaattaggtatattttatggtttacaattattatcattagaggaagttattataatgacaagattatggaggaaagttgcaaccagagaatcgaatgctaaaagtcataaacaaaatcaacaatcgatatcttcatttaaagaaatcaatgaagataaaaatgaagctattgtttcaaatgatccaaatattcaatttgctaataaagttgatcaattatcacaaaataatttaaataattatccagatttaatgcgtaatgtctctacacattctaaaaattattatagagcaaaattaccaattcaaaaatcatttccaaaaggtcatattaaatgtcaatatgcaaatcctaattggattcctttagttactgataatgcaggtaatcatattgcaattgatatggatcctgatattgatggttcaaaaggtcaagttataatttttggtagagattttgatacgaaatatgttattgcaccaaattgggctcaattcttagtatcatttacaaaggatttccaaattgctgaaaaatgtaatcttgattatgatccaacaactggtcaattcgatttagcttatgttgataagaatggtaatacagtcgatcaaggttatttatacgttttatcccagagggtacaaggtaatgaaatataatataatatgagaaaactttagaaaatataaaacaaaaactactgtataagcttaacaatttattaataagtaataaactctaattaaatctaatttactctgaaaaatcttcatcactatctaatgaatatgattttgctggagttgaacgacgtgatgtggtacgtgcactagttgttcttttctttggaattacttcttcatcacttgaaagtgcaaaatcttcagctccatcatcttcatcatctagtatctcaaaatcgtcttcttcttcatcttcacttgataaaactttctttggcgcctttttggttgctgctcttttaactgttggtgttttcttagctactggttcctttttaacgacttctggcttttcacttggtgattttcttactgcctttttaactccatcagatttcttatctttacttgctgtgaaattactgaatagtgaatcaaaatcatttaattcttcaatttttggtggactttttgatctagctttcttagcaggtggttcatcatcttttttctccttctttacttccttctttacttccttcttaacggtgtctttctttttagcaggtgccttacgctttcttttattattgttactaccattattactactaacagtttgacggttttctgcatccttagctaaaaagatttcccattcagctaaaaattcttctaaatcttccatccaaagatcttttggtgatttttgtaataatgtattaagcaaagcctccttttcacctttaacttttaataaactttcatatctttcctttgttaaggaccaaattggcataccaagtaaataatcatataacattgagctattttgtttatgaaccacaactaatccagtatctacctcatcacctgcattggttgctgtaacattggaaacagcagcttcaacatcgtcttcgacagatccttcttcctcttcatcctcttccttaatagcagtggatttcattggaattaattcattctttttatcaaaacctgggaaatctaattccttcaattcatcaatcaataatttcttttttttgttaccaacaattaattcaccatcaattatcattttaacaaatttagcctgtgctgaaatcttttcaacttgattagaatattccttcaccatataattctttcttttctgatagaattctaatctaacatagtaataatcttgaataatatcattaacattagaatatttcttaatttttccacttggatcgaatgcaaccatattagaactacttatggttgaaattaacttgaatctttctaacaaacctactctacgtgttttttccatttcatcatcagataatttaataataaacttaacaccaacaccgtgatcttcttccatatctttaatccatgctttttgtttatcactaccaccaagaccattcaacaaaaattctttcattgtaattgtccacattctagcaggtaattcactaataactaacgtattatcatcaatttcttcaattttaccttctaatctccatctatccttactaggttctcttgtaataataccttcccatcctttaaaccatggtgttaattcattcatttctttaccattcattaataattttaaattttcaacgatatcagcaggattaaatggtggtatactagtactccaacctgaaccaataccttcacatccattaactaataacataggaatgactggtgcataccattcaggttcaactgtttgttcatcatcttgtaaatacttcaacaatgggttatctaataaactaaaaactttcttggtaattggttgtaattcagtgaaaatatatcttgcagctgctgcatctttaccacctgaagctcttgaaccaaaaccaccatgtggtattaaaatatttaaattatttgatccaacataatcttgtgctaaaccaataattgattgcattaatgaagcatcaccgtgatgataacctgtatgttctgaaatataaccttctaattgagaaactttaatttcatctcttaaattacgtttataacatgcataaagaatttttctttgaactggtttaaaaccatccataattgaaggaattgatctaacattatctgccatagagaataaaattaattctttattaataaattctgtaattggaatttgtgataattcaggatctaaatatgtaccaacttgataatttcttaaccattctttacgatcatctgctttctttttagagaatgctaaatcgatactcattttatcttcatctcttaatgcatcaaaatgtttcaaatgtttatctaattgaccgaaatactctctcatttcctgtgctgaggaagtacccaaacccttatagtacttttgcttataagaacatgtcataccttcagtttctctccattgttcatattcaggcattgaatagaatgcaattgattttctacggtttgaaccactcattatagtaattttaacaattggggtaatgaattcaattaagaaatttggaatttctaacaaaccagggaaggaagtttctaagaaattaataattaaacctttaatatgagaaccatcatgatcttgatcggccataatcataattctaccatatcttaaacttttaatgtcatcaagtttatagtttttcttatgttgtaaacccataatttgtttaattgcttgaatttcagcatttttcataatttgatcaacacttgcttctctgacattaagcaatttacctctcaatggataacaaccataataatctctaccaacaactgctaaacctgcaactgctaaagattttgcagaatcaccttctgttaaaattaaagtacatttatacccatccttggtacctgctctattagcatcttctaattttgggtaaccagtaattctactttttctggaaccatcatttttctttagggccttatcagcattttcttgggcaatatccaagacttcatctaaaataccactggcaagaattttcttaacaaatttttcaggtaattctaatctcttaccaccaaatttggatgcttgcgttgtcaaatattctttagtttgggaggtgaaagctggattttcaactaaacaattgataaataaaaacatttttgatttaatttggaatggtttaatcattgctttcttgtttttctttttgatttgttcagtaattttaccaacaatcatattagaaacataatcaacatgagtaccacctaaactggtagcaatggaattgacaaatgaaacttgattaaaggaaccatcagagatacagaaagcaatttcccatctttcatttataatttcatgaacaatggtaggtaatttttccactggttcaggagtcaagatactttcattggtatcttctgtattattcaacggagttccatcttctgtttcaattttaagtggtatatgaggacgttcctccttttgtttttcaatagctttgacataaagttcaacatattgtttaaaatttgagattttcaattgttcaccatttaaagtaactttaatgcctctaacagaaccacagatatcataaactcttcttttaaaaataccaacaatattatcatctaattgagtcataccaaatttagataagtctggtttaaaaataatttctgtaaattcacttgttttcttatatgaagtaattttaggagtaccaacatcagacatattatttctccaagtttgaatgtattctttaccatgagttttgtcagcagtatgaactgtaaactcagttgagaaaatgttacatagttttgcaccataaccatttctaccaccagtaactttcttttgatcatcatcataatttgaagatgttaaaagattaccaaagattaattcaggaatccaaattttttctttatcgtgaatttcaataggaatacctttaccatcatttttaacggaaataatattttcaacgggatcaattctaacatcaattcttttcatggaaggatctctaattttattatcggcagcattgactaaaatttcatcaaaaattttgaataaacctggaacgattgaaattgttttcttctccatgattttggtttcatcattatagacccattgttcagatgaatgttgttcaacggatccgatataagtatcaggtcttttcaagatatgttctaattgagataatttttggtattgatctgaagctgaagatttcttagacttcgatgtagttgtctttgctttcttttgcacaggaggtgcagaatcagatgaatagtattcttcttcactatctgaagtcatttttgaataaaataaagcttgatttgagttaaaaatagatgtacaattactatttaaatttacgtgtttcgtgtattatagtaaatttgaattagaaaacaaagaagctgaaggtctaataaaatgagataaatgtaatgtaaataaagaagtacaatatcttcttaccatacacttatcagagactgtaaagcttgctgaaagaaactataaacactttcaaagaagaatcgaaaagtaaaaaagctcatcaaaaaccaattcaaaatgcaaaactagaaaaaaaacatgtcaaatttcagattgtaaacaacaaacgcaaaaaagcaaaaattcccactaaaaccacccattgagaagtcgataacgtgtaagtcacgataagttgacatcaattttctcgttttcttaacttctccttttttatcactctggagagaggagtctattggatcggtattacttcaagttaaggaaatattatcacttcctctgatatctcaacaatcttatctctacatcacatacattgcactacgtttatagaatatcatcacaaattacaccgatagaacaatggattctgctaattctatacccaggccgaattcaaatcaaccaaatctaacccagggatcggtatcggctccggtacaatcagttcaaactcttagatctaatatcaatcaaaaacctgaatcaacatcaaaaattttacctattaaacaatcaacaatgatagataattctaattcagtgcaaaaatcaacaacaaaagattcaacaaagtcatcaaatatccaactatcaaataatgctacaaacactactaatactactcaacaaactacgaaacctaaaccaattcaaaaacccacattggcacattttaaacctacattttcagttcctaaagatatttcaaatggaaataatatcaaacctacatcaaaatctacaaagcaattacattctgttcagcaacagcagcagcagctgcaaaaacctataatgatgcctaaaagtgataaaatgcaacgaactaattccctgcctataacttcaaaacctatccgacatacacccgtacctattcaacctaatcctaatactgcaccaagtgcatattttcatcctatagcaatcaaaccaaaaccagtaataaattcatccaataaatcaaatagaagtaaatccattaattcagttaaattatcacgttcaagttcattaaatgccgcaagtcacttatcaaattcaaataattctaaaatgaatgttgatgatacaattaaattatctacatctaaaaattgggtcttacctccacgtcctaagacaaaaaaagttactaaaaagaaagataaaaaagtttcaaatatgaaatcatctatcgttaattcaaataatttaaaaataaattcagtaactacaactatcaaaaaatcgccctcaactactgctgtttcatcacctatatcatcaacaacaaaagatgttaagaaacctttaactactacaagtacgaaaatggaggaaaagaaaaaaacatgtactaaatgtactatatcaccaaatattagaagtgtgttacttgaaccatcgaccggtaaagtttccgtgaatgcacaaatacattctaatattaatctttacactaataatgatgatgaattgaaagttcaattacaacatgttactagagagaatgataatttaaaaaaaatcttactcaaattaaatagggagattcaaactttgaaaataagtaaagaccctgttgaaaagaatatatcaactgcaaatataaaatccacatcaacgatggaacgtacgaaatcaatagcaaaacaatcatcctcgacaaatgatagtaccaccgttaatgttcctatcatcaataaacctatagtgaaaaatgaagcaaatataattataaacgatacccacgatatgaatgataatatctccaatttattaaataatgcgaatactattgatcctgttaacctttcttatagtttagaatctaaaagacaaaaagttttaagtttaagtccagatcatttcactaaatccttaaagggagttaaaaaggaatttcaaaaatgtaaaaaatgtgaagttggtgaaaaatgcacgtgtgatcaaggaaagaaagaaaatggaaaagagaaatcaaaggaaaagcggaaatcgaaagacgttaagataaaggttgagcctaatgataaggataatgcgaagggtaaacaggtaaataagaaagttgagaaggataacggaacggaaatacctaaatcaacatcctcatcttccttaattagtgggatttttcaagcagtttcaagaaatagtattaatatattaggattgggtaatagttccaacaatggtataaccaaaattagtgaacctactggtcttaatacattaaatacgatacttaaacgagaagagatcatgaagaagctgaaaagtgaagataattcacatagtacaacaaatattgaaacaatttccaatctggatattgatatgattgatgataatatatgtggtataaacacttctaacatagataatgataattcagaaatatttgatttcactaaaatgaaaaaagatgttaagaaaaacgattttgatgaagatatgatcttcaaggatatagctgcaaatattgaaggcaatggcaaaaagaaaaacatttctgataatgacgatgaattgctacaattaattgattctgaactatcacttgatccaactccgttggtatcaccagttttacttaaaactatgaattcggctaattcaaatattagtacaaatataaatattaatattaatacaaatacaagttttaccaccagtaaatctaaagaacaaatttctggggttaatatgacaagaagtaagagtaataacagtggtagtgatatttttaatagaagtacacttgcagatctaaatctgttcggaaatggagatgcaattatggatagtgaaacagttatgcttttcgatgaaattgctaatgatgatgggataatgagaaataatagagagttaaccagtaatgataatgatgactttatgatatattagtgatatctaaacgataatcctggatactacttctttaatgactttaatgtgtataaatttaacgattttaaaaatagacttacgtaattatacaatggatagacgcgactgtttttatattaaaattaaaaaaaatattaatcagtacaccaaaaatcttatccaatggttacgcagcattcagttagaaatttacctactaccctcaccaatagatagaattggcaaattgtatacatgaaggtttagggtttgcaacttgtaaatctttggaaagactttggaaacaacttaataattactgccaaaatgcaattcatgggtgttaaagcatacaaatttccacttgtcaaatactactggccattctttattggatgtaagtattagtctaatttttcaatcaattattcaaaattttatcaattatcaattttttgaacttaatactaacataattcaatcctgtttactcatttattatagttggtgttactactgttttaatctcaaaggcacaaactgctctttctaacactgaagaattcattaacgatccaagacatccaagattcgcaagtggtgaagttgaaaagaaataattttgctagcttatcattataataatctcttcaattatttatttataaatctagacacttagtaatgtttaatgtcatcatatttatttatttattttaaaacaaacaaaattgattcaaaaaaaaaattaatgctaatttaagatcgataaaaaagattaattgatatattgttatatcatcgtagttttcaaatcttacaaaattataaacaagttttttaaaaacaaaactttcattatatattatgttgttcttcagcagcatctaatgcttcctttaaagtttttaataattcatcagttttttccattccaatacttaatctaactaaatttggatcaacaccccatttagcaacttcttctaattcttggaaatgtgctaaaatcgcatatggacaaacaagtgtaaaatttgtacctaatgatggaccctttgaaagttgaactgtattgaaaaagcaaattgcatcagtttgctccttaaatactattgacattaatgcaccataacctccattatcacgtttaactaaatcataatgtctctttgaactatttgatgaaactgatggataataaattttatcaattaatttacttttttcaaataattctataactttttctgcattagcattcataacttttgaacgattttggaaatctcttgaattacgttctaaataaattgcatcttgatcccaaaagaaatcttcgtaatcttctttcataaattctttgatcttttcataatatttactttgtttattaactgacaatgaacctgacataacatttgaatcacctgagaatattttagttaatgatgagacaacaatatcacagtatggtaaaatattgacatttgatgaattaccaacagtatcatcaacaacaactataaatccaaatttatctgataattgcttgattctaataatatcaggagttcttaaaagtggatttgatgggaattcacaaaataaagatagtattctttcaccagattctaaacgtaattctaaatcatctaatgattcatcatctccaaatccataaaaatgaacacctgcaccccattttcttaagatattcaatgtgtcaacatatgggaaaccaaaacaaacagatttaagtttatttgcatcatttggttcactaatatttaatactattctatgtgcattaaagatagctgccatacctgatggataaagataagtattttgagaatcacaataatcattatcaaagtcagatgataatctctctaataaaatctttttagcttccttagcaaatcttaaatctaaattacgtccaaatctttcttcaataaatgttgcactttcagttttattgtttaaattattatttctaatagagactgaacttcttgaacttcttgaacttcttgatgctcttggagattgagaatgatttgatgaaccatttgatacttctgatgatcttttacttttgatttcagctgtaagtttatccttcatttcggaaaggaaatattcggctaatcttgatgaaataccttcaccggtatgttgccagtattgttttgtaagtgaatataagttagatgggaaaaagacaatagcaatattggcttcaattttagttgattcttcgtcaacagatgcaggtggaggtgttgataattgtaaaattctaatattggccttaactggtggtgataaagttaatgctttctcttttaagaaatttctacaacgttttgcaatattataagttggaaatataaaacatttttcattatctcttgcataagatgattcaatcaatttggataattgttgaatatcattatgaatgaaaaatcttggatatccagaattcattttattgacaacccattcctcaccttcttcataaccaacagtggcttcccaagttggaagagtgacagagacagcatgttgagtattgttaggtataggtgcgccaatagtttgagatggtatgttactagaaggcatgattcactgttactaaatgaatgaaataagaatatacactctaactccacaattaatttgtatacactttccatgttaatgattccaaggtgaaaaataaaaatttattattatgagtaatatcagcagctcggaaatttagattctttttacgtaatcaacttttttttcggaaatttagaactacaacatcatttttttttgttttgatgccatcggttttcaaggatggatcactggaatggttaaagtgtcgaattaccgttttttagtcaatcgacacttgaacaatgtcattccgtcctaagacaaagtcaaaatcaaaatatcagaatgggttacctcaattttattcttacaaggacaaagctgtctcaaataactattcacaacatgaatatattcgtttaataaagaatttttatcataaatatagaattttatcaaaagtatgtattgcagtgtttgcaatatatattgtgtttggatggatgttcaactcatcaatgggatactattcatcatcctcatcaccttcaaaatctcaaaccccagctcaattatggtctgatcgtaaattacaagttaaaactgcattccttgatagttggaatgattatgttaaacatggttggggtgatgacgtatactctcctgtttctcaaaaaggtcataatatgggtgaaaaacctttaggctggataattgttgattctttagatactcttatgttaatggattgtaaggatgaacttgaagatgctagatcttgggttgataaagaattagattacaatattgatgttgatgttaatgtatttgaaacaacaattagaatgttaggtggtcttttatctgcacattatttatccgatgatgatgatactatttatttagaaaaagcagttcaattaggaaataaattagttactgcgtttgatgataaaacaggtttacctgtaatggaacttaatttacagagtgaaaagccagggaaaaatggttatccagcaaaaggtgtctcaacatctgaaatatcaactttacaactcgaattcaaacttttatctaatttaacaggtgaagcatatttctggaatgctgcagaaaaagtcaatcaaatattagattctaaccaattctcaaatccagaatatgatggtttagctcctatctatgttaatcaaaatactggtaaatttaatggagatttgatccgtttgggtgcccgtggagactcttactatgaatatcttttaaaacaatatcttcaaactgatgaaaaaatttatcttgaaatgtatcaaaaggcatatcaaggaataaagaaacatctcttaagacattcaactccaaataatttagttttcctaggtgaacttccaaatggaattggtaatcctgtggattctaaaatggatcatttagtttgtttcattggtggtttatttgcacttggtgctactgaaggttttacagaatctgaagcacgttcaaaaccatggtgggatgcattacgtgaaaatcaattgaaaatgggtactgaactgggtaagacatgttatcatatgtaccatgatactccaggtacaggactttcacctgaagctgttgtttttaacgaaagaattaattcagaaacaaacaataaacccgttggtgcaataaattccttgaatggggacttttatattccttccgatcaaaaacataatttacagagaccagaaactgttgaaactttatactatttattcaagattacaggagatattaaatatcgtgaatggggttgggaaattttccaaaattttgttcaatttactaaagttgctgataataatggtaaaagtgtaagatacacaagtttgaaagattgtactgttaatccccctgttttagctgataatatggagtctttctggttagcggaaactttgaaatatttatatcttttatttgatgatgaaactggaaactctcttggatttatgaataatggtaaaaagaataaatgggatttaagaaatatggtatttaatacagaagctcatccattacctaagtttgataaaggaacatttggtaaggaatttaaacatggtgaatctccaataattaaagaaattgagtcttccaataatgaaaagatagaaagtaagactaatgatattaagattggggaagctgttgcaaatgaaaaggttgctaaaaaacctgaagctgtcatggatgagccaaaagaaaacaaaaaagtggatgacgttagtattgataagactggtaatttacaaattgaaaagaagaaactacctaaagttcatgaattccctgattcaatcggtgatttagatacacagttggaagaaaagcaaaaattggaagcaattagggaatcaaaattggatgagtcaattaataacgaattcaataaagtaagtcaagaagaaactaatgaatttatagatgctgaaaatgataatcttaatgttgcggaaaatcttgaagcaactggtaaagttcctgtgccgaaacatgaaattgcaaaatcattagaggacaaattcggggatgcattgaaagagccagatacgcttgaaaaacatgttaagattgaagagattgatttggctgatttggacactaagcctgacatggatagtattgaaatcagtaaaaaaattgcagagaaaatgaaagcagaaggtgaaaagccaggtatgaaacaaactgttgctaaaccattggatgaacaagcagagattctgattgaagaattagatgcatcagattctggggatttaagaaatttaagagttgatttaactgatgaactgactttagatggtgaagttcatcaaataggaatatctgaagatcaaattgctgatttaacttctgatacgaaaatagttaaaaataaaaacttattaaatgaagaacctgttccaaaccaagacaaagccaaatctttgaatgaacagattgctgaagtcaacaaagagattgaatcagaatttaattcagaaaatttgattgatgatttacatttataataattttaacactaaagggtgtgtttgataaccttttttcgaagctttcatagttgtattttgattttaaaaaatataattttacataatgtatactttattatacaataaacgatgaactgatgacttatatggttttgaatcttttagcagcacttctcattaacttagtaatatcacctttaccagtggctttttcttctgccttagcttcagctttacgttttgtagcttgttttttctcaaatttttcagcttgttcttgtctggatttatatcctaatttttgaagttcttcacttttagctaaaaattctgggtcatccttttccttgccaactaaccactcaagcaatttaatttcttcaccataacctgattcactgccatcttcaattggagtttctaaaattaatggaatattatccaatcttttgtcattggccaataatctaaaacattcaagacctaagaatccccagcctaatttttgatgtaaatctctgtttgctcctaatggtgccattgaatcgtttaaatgaattgaagctaaatgctcaaacccaactttctcttcaaactctttccaaaatgcattccatgaatcttcattactcaaatcataacccgctgcaaatgaatggcaagtatcaatacaaatacctactctctttggatcatctaacagttggaaaagtgcatggaaatcatctaaatttccacaaacataactaccatggcctgccatattttcaacaactattctaacaaactcggtttccttcattgctttatttaacccactcgctaacttacggacaccggggctagcaagtatattattttcatcctttatagggacattctcacctaatgaagagccagggtgaaagttataatgaccaatatccaattgttcacatcttttcaaatcatcaagtaaacagttgaaagacttttcccacttttcatcatcagggttagccatattgataaaatatgatccatgtggtaaaatgtcagttcttggattataaacatgttctttacaaagatctttaaacgtttttgcatctttatcagtaatagcaggtgattcccatcttcttggagacttcaaaaataatgcaaatgagttacttccgatcgttattgcattggtaactgccttgtataccccacctgacataccaacatgagcaccaaactttttgtttcctgttaaaagtctttcgaatgtacgtacctgtaccttttttgcaactgctttctttggtggcattttttattcttctattggttgtttctaaggtacttaaaagaagttcatcaaatcaattattagttcatgcagaatttgggtttactgaaaattacatgtttggggattattatgtaatcaactcaatacgaactctgtaaacacccgaacagagttccctaaacattgcaaaattattcaaagtgtatacattttagagcttgaaactacaatattatataactaacttaaatagtggtatcaactcccctgataacaaacatctaattctccccttgaaaatcttgtgaatgcatcatcattaacaagtacaatatttctgataaaatggccatcaaaaatctccttctctggaaattcatccggcgttagtggtataggtttgtcagatttgaagataaacttgttaacatcatccgatgatttaaaacttaatgtgtatattttctcttcagatctgttcattttcaaatataactcaaaggtatccagtatttcatactctcctgtgttaatgtttcttactaaaaaaacatcatcttcaccaaatgaatatccgcaacaatacatttcgtgtgtatttgcagaaagggttttcgttgagtcttgttgtatctgtgacccggtagccaaaaattcttcactttgtatcacatcagactgagatactgtttcaaggctagatataccgttactgattgcggtttgggtctcgggaatgaagttgtttggtggttcgactatactatcagatacattataatcttgattagcagtggctgattgggaacttgctgtttgattggtataatttgactcaactatggatacagtttgatttgcattatcctcacttatgtgttttggtacactactattatcaataataattgactcagattgatcagcattgttttctgtagtatttttttcttgcttcagtatttgtcttgaaagttgttggatagtttcaggatagttagataaatcgttatcgccaattggcatatcattcaacagtcgtacatttccttggttattattgttatcaaattcaacttgagattgtgtagcaatgggtctttgagttataaattcattagtttgtgaaccaaatacacctatatcatcaacaagctcattgagtccgtatttctcatataagtcaaatttccaatttgaaggacaattattttgcaaattagttaaaaatcgtatcaaatgctgatcttttgatacacgaacttttttgataacatctgatttagttagtgttctaatggaacctttacaaaaatcaacctcattcttatacctctttaaaaatccattaatttcaactaatattttttttgaataaacttcatcgtttggctctaacccgggtggcggtagattattagtgttgaaaaattgttgagcataagaatcaccaagttcgtattttattactttgttttgtggtaagtatgatccatcattcaattcacagtgatgtgtataaaatcttgacgtttgtacgcaactattgactgtaaaatctgttccgtatatattaacaaaattgtactgaaatctgtgccgtacatatgaaagaagcaataagtatattttagcaggttcattcactctttcattgggaaagtttgatatgcttatttcatcaactgagtattgtttcatcgtatcagtattgtattatcaattgatatagttgtaaaaaccaatgcttgaatgaaaccagagacacgaagatcataaatcttaattttctattatgaaaactatttttgtggatgtctagtaaaatttctttaacctttacatcattacttctatgcatgttttccacgttgaatatatagtattcgcaataaacaaaaacatttattagatgaatagtatgtacacactgaactgttagacatggagaaacaaaggagaaaaaaatactaacaaaatatttaatatataggaaataaacaaatgaaacttccaagatctgttcttgagaggatgagagcaccaaaaggtgaatctttcaatgaatctgaaccaacgactgctgaaggctattatgatagagctgttagtcatgaagaatcaggtgacaggtggtttagttcggatttatcaaaggctatacgattttattatcgttcacatgttgactatttgaaggcattaaagttggaccccatcaatgaagatgcattatataatctgcccagactcgaatatgaagtttacagtaaatataccaaggaagattctgtcattttagatgacttaacaaattgtgctgatgtgttgaatgataatggaaaggatggtttatttcaagatattcaaggaatatgtaaacatttcgaatcaagtatcagtatacttcaacagtctggaaatgaaagtttgattggttatgatttttattttaatattgccatatgctattctgaatatattgatattctatgttctaatgctcaaaatattatggagattcaacttggcgatgaattgacgctttcaattgacagatgtatgcaaatgttcctaaaattctttgagcatatcaagcacataatgaactcaaagattggtgatgattctgatacaattgaagatattgaatctatcacaaatggttgtatcgagagttacagaatgattgcaactgtttatgaaagtttatactccgaccaattgattatgttcatggatggtgtaatgggaacatttgttgaagaagttgataccattgcaaacacacttgtgccaattatacaaaatataggtctgttgaatactttgaaaatttcaaaattaaatgaaagatgttcaagagtgttaaactgtgatgaatttttgaatctatggagttcccacacagacctcaattctaatcttcaaaaaaggcttatggaggcctcttcaatgcgatcattcatagataaatttgaggttgtttcattggaactttctattaacaataaatggagtattttgggtacaatgagcaaccaatacagatcgatcacggatatcatcaaacgagaaatcactgatattgaaacatccaaatctatggaaagtgatttactaagtagtaaaattattttgatgtgttcaatctttattgaacgtgccgatattgaattggaaagatcactggtgcctataactgaagccattagcagtcgaactattttacagaataattctaaaactctactaaaaaatgcattgatcttttccaaaaaatcaggaggaataagagaatccataatgggaaaactgagtagaaaaaagagacaaagagaggctgctatgagattatgtttattagaaggtaaacatcaagatgagtggaatacaatcatcggagaacaatactggcctgctgagttgaatacaattggtgaaattgaggcatacaagagttacttttcataaaaatttatagattaatgtgtactttagattagcactgaatcaccttttattgattctaagtactaatttaagcaaaaaataagagatatttatatcagaaggaaggcaactggtttctcctcaaagtcgaaactaggagattgttcacacttttccattgttagtcatcatcaaaacactcaaaaatagtttcctccgagacggggaattgaaccccggtctcccgcgtgacaagcggaaattctagccactaaactatctcggatttgttgtaatgtaagggaataaatacaagttgttcaataatatccacgtgaggattaggtaagctgattacgtaagatgataagatggaaataggaattccgagatacggaggttcggagatgtcggagtaagaaaggaatgacttagattgaaattgaattaattatgataaggagtggtatgattgataaggaatagtttaattaactatattaaggaatggttaatattgtaatataaataagtatgatatcctgtataactttgtataactctcttctgagaggggacattaatcagagtattagttagagaacaatctactaattaataccaaccgtctcattgctactcgctgtctattacacaaataaaaggtccaacgagtaaacttattttatacttattacttccattacgtaattaagtattatccactatcttacatattttagtttacatttggtagcaccggctagtgtttgtgttcctaattaaatcaaattatattcatctattaattaaattaaatcaactaaaaatgtcatctgctaaagataagattaatgctttaaagcaacaaattaaggaaataaaattaactgaaaagaagaagaagaaagaattgtcaaagaaacattctatcaaacattcaaagaacgttattaaaaagaagaaacatattaaaccacctcttagaattatccattccgatcctgaaatgtctgattattcatttgatgatgctttttcctcagataattcccattctgataactccaattctgattctgatatttctgattccgatactgatactgatgatgataataaaacttctaaaaatgataaacttagttctaactttccaaaatttgatggttcttctactgatgataaaggcaaggaattctccactactgaagctcaacttaaagcaaaaacttggttatctaagttgcacgttaatttaattgataaaggtatttcaaaatcaagctgggctagaaaagctattgttaatctcgaaggtagagcatacaaatgggtagaacataaattagagaagaatccaaagtatttaaagatttcctgggaaagatttttacgtgatttcaaaaaagaattttgtcctgttattgaagatgatatgcatgctatggattacaagattctaacttttaaaatggttccaggaatgaaagtctctacatattctgatcaatttaaagaatatattcaagaattggattttgaagaatctactaaatttcaaatttcaagatatttacttggtttaacacctgaattgaaaaagatggtatcccaacaaaaacctcgtacctcgaatgctgctattcattatgcagaagattctgaagctattttgaatgatattgaagaagcaaaaccaaaaaatccttggatcaataatatcgaacatcaaactcctgttagacgctcttattctcgcccatatagagttaataaatataaacctggttatcataataagcaaagatttttcagaaacaaaagaccatttaaaaggtacaattcaaattttaccccaatcggtggtaatcgttccatgcatttttctcgtcctactaaactaaataataaactatctaataataataatactagttctttttcttatattgcacctccagtaagtattcaacccgaagttgatcatttaaatgtcgagaaggaagaaggtgatactgttgttaataattctcaaagggtgattccaagagatgagactattaagaagggtgattcctctgaagttaaattgttaaagggtgattccaaacaagaaacaaatagtccaactttaaacattccttcattacctgaaattttacatgttaatgctttgaatattgaaaatttacgaaaaatagatgtacaaattgataataaaaattccgcatcagcaattattgatactggatccaatacagatgctattactacaattttatgtgatgaactgttattatcaagcaagattagattatatgttgaaccaattagtgctattttagttaatgatactgttgatgctattggtgaactagatatagatattgatgttgatctatttaataatcctatcaaagaaaaaagaacatttttagttttgcaggcaaacaccaagaaattaattttaggacttccatttttcaaacaacattatgataagttagatatacatgattttattggagatagttttgcaacaccaagtgttaatgttaatttaattgaatatcatgatagacatatttctactattattaataataaagataatgattcatatctaatatatattaattcaatgaatgttgaatcctctgaagaaaatgatattaaaactattgataaagaaattaataatgttgaagttaataaatacagaaatgatattttagaaaaatttaatgatgttgttactatgaaagaaccaaatgaacttcctcctaaaagaaatcacgaacataaaattattttagttgaatctaataagcaagttaatagaaatcaatatcctttaagttattcagaaaaggaagaattaaccaaaactgttgataagttaatacaacaaaaatttattagaattagtgatagtccttataatagccctgttttatttgttaagaaaaaagatggaaccatgagaatgtgcattgattatagattgttgaataataacactgttaaagatagatttcctttacctcatatagaagaaattatttccaagtttgaatctgctgttgtttattccaaattagatttaatgtcaggttattatcaagtaagaatccaagaagaagatattccaaaaactgcttttagtactgattatggtcattatgaatgggttgttatgccttttggtcttactaatgctccagcaacttttcaacgtatgatgaatactatcttatccaaatatttgaatacatgtgtgcaagtttatttagatgatatttttatttattccaaatcttataagcaacattatgaagatattaaaagtgttttatctacattaagagaacatcatttaattgctaagaaatcaaagtgtgccttcttttacgatgaattaagatttttaggtcatgttattactaaaaatggaattaaaactgatccagataaaattgaaaaggttaaaaattggccaattccaactactgtcaaagaagctcaaatgtttataggtttaacttcatattatagacgttttatcaagaatcattctaagattgctgtaccaattcataaatttattaccaaagaatcaaaatgggaagatgaacaaactaatgcttttaatcaacttaaagacgctttaattaacagtcctattctagtacatccaaaatggaataatgattgtacttatgttgttcatactgatgcttgtggtagtgctttaggttatactttagaacaattagatgaaaatggtaaaacaagaggtacaattgcttatggttctaagaaattaataggagctcaattaaattatggtatttatgatagagaatttatggcagttgtagaagctttaaaaaattggagatattatttattaggtagacattttgttattgttactgatcataaaagtttaatttatctacgctatcaaaatttgattgattcaactagggttgcaagatggcttgattatttatcacaatatgattttgaaattcaatatgttgcaggtaaagataattctgccgcagatgctttaagtcgttatccatatgaaaaattgtctgttaaagatgctttagaagttaatcatattaaatttttaggtaattcaaatagaaattcaaataataatattcaaattaataatactgaagttactgttactacttttcctatgaatgatgaattaaagaatttaattattaaaggttataaaaaagataatgtacttgctgatgtttattcaactttgaaaaataaatctgaaattcctattcatttaaaccaccatattaaacattatcaacttaaaaatgatttactttattataaaacattattagaacaagattgcaatagattagttattcctcgttataatagtttacctcaaagatttattaaaaatgctcataataatcctacttctggtcattttggtccttggaaaacttatcaaactttaatggattcattattttggtttaatatgatgcctacaattaaaaggtattgcaatagatgcattgtttgtcaacaaaataacacctctactcagaaaactcaaggattatttcaaccattacctgttcctgaaggtagatggactgatgttacaatggattttgttactggtttgccaacaactacttcaaatcatgatatgattatggttattactgatagattttcaaaaatgtcacattttattccaactgtgaaaactttaactgctgaaggttgtgctaaattatttttagattattttcttaaacatcatggatttccaaaaagattaactagtgataaagatattaggtttatgaataaattttggtatactattcattttttctttggtgtttctttattgttttcaactactaatcatccacaaactgatggtcaaactgaaagagttaataaagttttaaatcaattattaagaaaacattgttcaaatgatcatttacactgggatgaatttttaccaatgtgtgaatttgcttataatagtacttaccatgattcaattaaatgttctccttttgaattagctataggatataaaccagattctatgaaaagtgttaatagttggaatttagatgataatagatatagtccaaatgctcaagaatatgctagacgtatgagattaactttaactcaagctcaagataatattgtacaagctcaaagattgaatgaaaaatatcataatagatcacatagatttcataattataaagttggtgattatattttattgcatcgtgatgcttttggtgcttttgctaaatattataaaattcaacctgcttattatggtccatttagattggtgaaaaaaattaatgataatgcttttgaagttgatttacctaagattaataaaaaggatagagtattaaatattaaaaattttcgtccatatgttcctccagtcgatttattatgtcgtccacctagaactaatgctgaaattttatcaagaattaatcaaatgtgtggtattgctggttttgatgaagaaaagaatacttttgatgtttattggagagattgtgatcctttacttgctacaactattactgctgatcaatttaatacggcttcggaatcacttcgtcatagtttatttcataatgccaagatgatttgtgctcatgagcaaattgtttaagtatttgatttaatttaattttaacatcagggacgatgtttcccaacagccggggtaatgtaagggaataaatacaagttgttcaataatatccacgtgaggattaggtaagctgattacgtaaagatgataagatggaaataggaattccgagatacggaggttcggagatgtcggagtaagaaaggaatgacttagattgaaattgaattaattatgataaggagtggtatgattgataaggaatagtttaattaactatattaaggaatggttaatattgtaatataaataagtatgatatcctgtataactttgtataactctcttctgagaggggacattaatcagagtattagttagagaacaatctactaattaataccaaccgtctcattgctactcgctgtctattacacaaataaaaggtccaacgagtaaacttattttatacttattacttccattacgtaattaagtattatccactatcttacatattttagtttacatgtaatttttgtttggtggtactacttagtctcaaaaataagatcacgtgattttacaaatttaaaataaatgttgcttttaatcattgtttaagggcaattttctttaaaaaaatgtataatttatgcaaagtatgcttaaaaagggctggtgacctggtcaaaacttaaataaatggatatttgttttggttaattttatagatttttgaaaagactaaaaaattttttaatttctcaaaattcctgagcaaacagtacttcaaaaaatgcataaaaaaataaaaagcaccttttatagcagatgttttaccactccaagagtgtatgcattaataaaataaagatagtagattactttttcaaaatcgattaattttaaaagataaaacaaggtttacactaccaaaagacaaattctttatgtacttattagaagtttagtttcaacccagtaaaactaacatctacaaagatagcaattcagatttaaagaagcacaattcacaagaatatctagtaccttgcatacgttttatttgtcgtctgatagctatttaatcaactattccgttatctctaaacgagatagcgtatttgagcctaccttattgtgaagattacatctctatcttgagagtcataaacttaatattcaatgtttatcatacaactgtaaaaggaaatattctgacttaatgtatttcctaattgagtaaactaatgacatcggaaaaaaagcagtgtgacatgtttatctttttcccgattaggtaattcagaatattggaagatatgggagatttctcttcttctatgctaataaacacggttttaaagcatacagtaactaaaagaatacttactagtacaattaaaacccaccaatatgcaccaatggcagtgaaccaagcagaaaaggcaggttatcgatgtaaaactccacaaaatagagatttcaattagggctgaaaaaggaaatctttttttttctacacagcgctttaattgttctgttgtgatttcattgttgaaaaaactttgatcccagccaccagagtattttctgctctttccttttaattttccctttgatctgttatattcccttctagctgctctttagtcacatcttttttattgtattctgctctatcacacatatttattccgtttctgttaggtacctcagctgagcttattttgcttctctaactatattctattctttaaaaactcgacaaactatatttaactgtgctgttctgaacaagttattaattattttacaatttatataaaactgagacaactcagttttctattcttttaccaactttattattaatcacttttaattaataattatattcaattgtcaacttacgggtgaaattaattaatatcatcaacagacattcagattaagcaaatcatccatctaattacattcctttatttcaatcagaaaaaataatcatttttttatcaatgactctctttaattcacaaaataacccattgatcgttccttctcattctgaatcttcaagtttaagaaaaaaatttatttgtgagtttacaccatctgaatccgacgaaaaagatatacaagccaaccttaaccttaataattcgatgccaagatcattctctcattcacaatcacctaatccagttgtgacaccaatcttggatagaaaaagaaaattcgaaacagaatttccttctactccgatttacaaacaaaaccccaatttaattactcctccaagatcaagtaaaagatcgaaaacagcaccatcatcaccaattaattcagctgagatatatgaaactcccaaaacaccatctttcagacatgatttcaatatcaacttacctttagttgacaataataatatttataatgaaggctcaaacaataactatcaatacaaaatgtcaagcccggaatattatccaggtgataatgatgctgtaaatgttacacctccagaatcagaagaaagctcacctaaattatctactgcttctttgaatcaaccaagtgttacactcaatagatcaagcaaagatagtgtttatcaatatcattaccctgatacatgttatccatttaacatttctggtagttcggtaagacaaactgatattaatctgaaactgaaaacttggagagctacatgtacagagaaagtaaaacatgaattcaataaatcactgaaggagtactcatcatattctgaaaaattgagttcagaatcaagggccagagctgaatcacttaagcaagctgttcctgatcttcacaatacacaaatgtttcctaattttaaccgactcaacaatcttattaacaaaggtattagctatccaatgataaacaaaaatgatggaaatcttgaaggtattgcaaaagctaaagaagaagcacatttgttgttatcattaagagataacggatccaatttttcaactcaatctactgacaaagaagccaaaattccattacaaaatgtgacaaataaagttcaattaccaccaatcagcgaggtacttaaactaattccaattgacaagtcaacaattcatccaagtggtttatcagcccttgaagtcgaacaatacagaaatccaaatactatgtctattttattgaataaaaacgaaactaatttttacaacggaagggaaataaaattaggccaaaatattcaacaatttgattgcacttatcaaccacaagtatatcaccaatacatggcacctcaatctcaagctccaactatagcaccccctccactcataacaacattgcaattaccaaggccaattccaatgacactcccagtcatggttaataaaaatgaaaatgttcaagcgataagaaaaacaagaggatctaatgcatttgacgacctgaatgcccaattaaaagatttaaatcacaccaaagagccaccaacaaacaacactaataacaaaattgcatcaaacacagcaaccaacaatattaagcaatttcaaaacaagttcaaaactcaaaataatgtcctaaaagttagtaaaactagaagatccaactcttctgtttcccaaaaaagctctaatagttcaagtagaaaatcttccaattctgaaagggaaaaatatgtgttgaataatttaactacagaaaaaatttcccaaaagagaacaaggtcaagatccagatccagatcagcaactagaacatcatcaattgacagtataaagactactgaaataccagtgtccatgcaatcaacacctaaaattataacagatgttaaatataatgtcaacatcagcaattcattattactgccttgtgaaaatatgatagtaccaactccaaacaatacacagccaatcaaagaaaatggagttttcaccaatgaaattcaacatactcatacacacagccatcctaataaccgctcaaataaaacatgtatgtcatgtcattcatcctcaagcccatgttggagaccatcatggtcaccagatgatgggcaattatgtaactcatgtggactcagatatcgtaaaaccaaggctagatgttataatcaatcctgtttgaaaattccatcaaaaagtgaatggtcattaatggtaaaacgtggaaaactgttacttgatatttatgataatgaaggtaacgtggtaggcaaagaaatgagttacagatgtcttgattgtgattcagcaatggaaatgactctttgaaataagagttttattatttttagtattttagtttttgtaatcaattcataattaattagtttatatttttgaaatttatattgatgtattatacagaagaatttgtagcttataagtttacatatttgttattaattgtttttaaaagcatcacgttaaaatgtaatcactactaatagactcagacatggtggctcgtgagacattccgaaaaaagtaatgttagcgatatctgtttgatatctgttagaaatttttttaacacagcagacaaatccatcatcactgaaatcaattcaattaatggtatatttataatactgttagtaaatcttcttctgcaataacaattttattcaagcaagaaaacaaacatacccgttttaagcaaaattgagaatgcgatgctcattggtttcttatcaactagctaaaactgctaaattgggtctacctcctctcccaaacctgccgaatgaggtacttctgaaatataatgcatttacttccaaatctgtctcaaagcttccaaacaaaaattatgatagaatggagtttttaggggattcattttgtgagtttctatttgttaagtctcttggcagtaattttccaaatcttgatacatctagcttacgagctttttatttatccagtaatgtaatggcaaaatattcattacattatgggttaagtgataatttgaaaatttctagtaattcaggtcttcttaaagctaaagattctgctgatatttttgagtctttctttggtgtctttgcatattgtgttttttcatctaaaagtaacgagtttccattgaaagatagatataaactgtttaaagaaagcaatgattggataaatggaataatatctgaacgtgttaaagtgtcaacaaatgaaggaacagataaatcatttgaaatttcagatttggatttttacgttgacaatacaactgatttgaaaaagactacggcaactatctcaatcgagaaaaatcagataagagttggtaagtcattaattaggtttcttttgactttaaaaatgtttgaaacatatccaaatttttcagaaggagatatgactgcactcagagaccgtttctatgagacagatgcacttagtattattgatgaaaaactctgtaaaagtttactccggcgaaatccggcagagcataaggaagatgcacttttactattaggaaagatgttacttaaagatactgatattttggaagtttatagcaacatttgtgaaataaaaggtttttttgaagaggcagcaactgaatattttggtatgaattctgaaaacttgaatcttgttgatgcattaaagttgttagatccttcatcgcccccgccactactatctacaacacaaaacaggacagcaccaagccacatcacccttgacaattttgaacagattgaaactcaaataattttgatgggtaagaagagtaagagtgtagaattgttattagataaattcaaattttgtaaaagcaaggacattcattttcaagctacagttaatagagacttttcagcagaattaaaagctttttatgaacaaaagataataactaataaatctggatcctcaattatagagacactcgaatttgttttaaactctctactcgttaaacaaaagtttaaaccatatatagatgaagacaaacttaaatattttgataattatttcaaaaagatggaaatttctgaatatcttgctttttttgacaagataagatctcccacaactttagaaattaaagaattgaaagctcaaggttcatcaccaccaaatatggaacatattacgaccacagaaaagcaagaattatctgatgctcctgaacaatctcaggatatatcaaatgagcactataaaaataccttaccccaaaatcagattagttccaactccacctccaataaatcaccttcaaaattagcagtatcagttgaaaagaagtctggagacatccaaaaagtagaaactaacataaatacaaaagtggtaaaatctgaaattacaccaaccatgaaagacaaagctgataataaagaagttttaaaagttgagaaaaaaccccaaaataatgaaaaggctccagggaacctatatcccaaaatactagatggaattcatgtaatatcagaaactattatatcaagcagaatgaaagcaaacggcaactttgagttacaggaattaaaatcatggcaaaagtataattacactgtttccagcaaaaagattgcatttgaagctattattcattccacaacagattgtgcaattaatgttagttttgaaggtgtagtttttgtcagcgtctcaggaaattcattgatcaatactttaaatacagcactaaatactgttttatctagtgagaagtacaaagggattgcaaatatgaccaaatttaaaagttttgataaacaacataaccttaaaagtggtaaatataacaatttaaacgaaataatagatgcaattgaattagaatttattcaaagtggaaaaaaaattaatttcttaggatcagatacttggaaggcgtatgaatatttggaaaataaagaaaaacttgagtttagtgctgaatctaaaaacaatacagaacacctcttgaacataaagtacaaaggtgttacagtaattgaaacagcaggaaaatctctacatgatgcattggatgtgtcattgaaaaatttactttccaataatgaacttttaacagatcttcaaccaaatgatataaacacaaaaattataaagcttaatagtattgatcaaataagaaatattcttttacttcaaagaaccgataaaagcttgttggatatgaattcttggaaacaatattattttactactacctcaaaattagatttcacttcattcatcaacgataaacaaaaatctaaggttgttattagtcataaaaatgtacaaatcactgaagcttcaggcgattctttgtttaaggccttagattctgcattgaataaactatttgtcactgctaaatacaagaaacttttagatagtaaaatgttagaaagttatgattcatttattgataagagctacgttaaaaagctggttgaaaaaatagcaaaagatggcaaccttgataaaaatgatcaaggtgacaagaaatatgattttgaaaatttgttatcatggaaaatctttattgatactacacgttgtaaaactatacgtttttcaattaaagtaaaatcttcaaagtatactgttatgctagtggttaataattctccttccatcacacaaacgggtaattcattaactgaggctttagaccgagctttatttactctcatacacagtaaatgttacaggggtatttctgaagtaaacagattgaattattattttgaaaacacagaagttaaaacggttctcttgaaaaatatcacacaaatcaaaaacttgatattatcacaaaatttaaaaactgaaagtgacatgggttttgaagatttggaatcatgggataagtttgataaaatgtttaataattctgaagatatagttgttaaagctctcatcagtaccgatttaacttctacagttggtgttttttataataatgaaattgttattagttacacaagtaagtcattggttgaatccctagattattgtttggatagatttgttaaagaacacgaatctatattgaataaaaagactaaaactgtacctgcaaatgaagaaatcatattactcccagctccagtaaagaaagttgaagaaattaaagaatctgaggtgatcgaaaaggtagaaaacattaaagaaccagaaatgatcatagagtctaaaaaaatcaatcgagtcgaagaacccaatgaatctgaaacagtagcagtgaccgatgaagtagttgaagaaattgaagtgaaagacacggatattacagttaaggttgaaatgaaagaatcattagttccaatcaaatcagaagaaaaagcagtggatgctataaaggtgattgatggaagcaaaacggaaaagttattggatatttcaaaagaaggtaaagaagcaccaacattatttcagcaaaccgtttatcatttcaaatcaatgtttaaaaacggatgagcaaagataattttttgattatataagtttcattagaaacgctgttatcattaattgatgataatacaatatctgtacatacactatctaagtttataaagtaaaataaacaccttggtaaattaaactcggctcagcacaattcaacaaaaaatttttttaaggaaaaaccaacttttgccgcggtgctccaaagcaattcccatactcatccattttgggaaattgtctgccaataattaaggtgtttacatgaattattcaatcaatggataaaaaatactaactagctgtagatatataccaataaaggtaattaataaaatctatatcagtaaaataaaatccgttctttcaaagaatcacctattttttgttattttaatctaatattacaccgaaaatcatacttttatccataatacaaatttctttgtttactaattaaaattttttcatcgacaaattcactggaaatatttcaaaacgttgaaatttttttgtgagcaaaagaatgtacagccaaactttatgaacttcccctctccttttgaactttcttacttttagtaatgatcaagaccattgtaaaaagatttaaaatgacatcaatgaaaccatctatcccagtatctgaatctgttagttcagttgatatggaaattggtagcagctggactgattctaatacaagtattagtagcaccaatagttatgaagcaatggttaaagttattcaaactaaacctagatttcattctattaaagatgcaattcataataaaattttaaatttgagagcagaaggtagagttgatgaaagatcattctatatctgtgatattggtgaaattcgtagacaattaaatttatggaaatctgaattaccatttattaaaccatattatgcagttaaatgtaatcctaatgaagaattcattaagaacatgattagtattgaaccagagatgggatttgattgtgcatcattagctgaaattgaaacaattcttagaattaatagatttattaatagggataatttaatttatgcaaatcctattaaaccaatttctcaattaagatatgctaataataatgatgttaatttgacaaccattgattcaattgaagaagttgaaaaaattgcaaattttactgatggtaaaatgaaagttttaattagaattcaaacagatgattcaagtgcaacatgtccattaagtgttaaatttggtgcaaatttacaatattctgaaaaaattgttgaaaaatgtattcaattaggtgttcaaattagaggtgtagcatttcatgttggatcaggatttaaagattctaatacattagtaaaagcagttgatgatagttataaattaattgaaattattgagaaaaatcaaggtaataaatgtgatataattgatgttggaggaggattttccaaagaatcatttaaagaatctgccaagatactacgtcaagagatggaatttaaatttggtaaatcaatttcaaatggtgaaattaaaattatttccgaattaggtagatttttaagtgcaagttgctttacattagttagtaatgttattggaacaagagaagagattggaggtggtaaaacaagagtttatttaaatgatggattatatggtaatttaaattgtattttatatgatcatcaagaagttgaaccaattgttataacatctaatggagaatttgtttataaagaatcaaaatcaaatgataagaaactttattcaatttggggtccaacatgcgatggattagatcgtattagtaaaagagttgaattaaattatgatattaaatgtggtgattttattggatttgaaaattgtggagcatatacaaatgcagcagctactaaatttaatggatttacaaatgaatttgattatgaatttattgaaagttgacatgatattatattttctttagattatatactagataaactatatttaaatttgtaaattaatgctttttttttctattccttcagctccttcagctatttaattttttagttgatataggtatatcgttggattcccttcttgaacgtttattattattctgtatattattattattataatcaggcaatgaaccataagtatccagttttaaatccgaagttgaagaagcaaaattataatttaaatcatcagcttgaccagattgtgatagagtaaatgaatcaatggaaggatctagtgaatctgctgataaaggtgggaatgatctatttcgtattttttgtgaatttaatgaagtataataatttgataaagagtttgataattgaataccttgatcaattgaatcattaactacttgtaaagcttgaaatggagataaatttaagaaaggttgaaataaacctgaagataaaggttgtgaagtggatttttgttgaggatataagaataagtcatagtttgattgataattgaactgtgattgagattgagattgtgataatgaaatacttaattttgtcagattatcagttattttatgattaatcatattagtgtaaggtattataaaattaagaccatcatctgaggaaattaattgtgggtataagttatgtaatggtgtcatataaggtaatgatattataatttcctctgcaagacaatataaatgacaaggtatatcaagcaaaattgtatttaaggaaggatcagttaatgtattaatacctaataaagaaagtgacatataaggtatatccattataatattattaccaaaaggtatcgataaacgaatagcatttaattcaggatgaaatacattacttgataaacgtaaataccaaatatttgaagcgtatcttaaaagatgtgtatcaggtacatcatgaacggaaactgttttaatataatcactgaaaagagtacagttttccactgagggaggatgatcaattattttcaacatggtgttagaaagtagatgttctatcttgtgaaaagtttccaaaaccttgaagtattaatttgaaatatatagaaatagaaatagaaatcgatgccgtacatgtagccggttggaaaaaagtccaaatttccgagactgaaatttccgaggaaatgtggtacgttaactaagagacaataaatactttatgcaatacaatacaactgttattttttacttggtgccaggaaccagacattatatactggatcttatcaatttatttcttggaaattattctcctttgatcttatcaacttcttactttctgttaccaaccaatgaagtctattaagtgtgttgttgtaggtgatggtgccgtcggtaaaacctctcttttaatctcttatacaactaatcaattcccagaggattatgtacctacagttttcgacaattattcagcaaatgtaatggttggtgatgaaaaagttacaattaatttatgggatactgcaggtcaagaagaatatgatagattaagacctttatcttatactcaaactgatattttcttaatttgtttctcagttgttgaaccttcatctttccaaaatgttaaatcaaaatggatgccagaaattaaacatcatactccaaaggatactaaaattttattaattggtactaaatctgatttaagagatgatcctcatgcattggatgaattagatgaacaaggtgcaattccagtttctgaaaatgaagcaagtcaattagctaaatctttaaatttagttggttatcttgaatgttctgctgcttctcaaaaaggtgttagagaagttttcgattgtgcaattaaagctgttattttcccagaggaagaaaaacaagtagaatcaaatgatcaatcaaatacaaatgtaaatacatctactaatactaatacaaatggtgttgataattcaactgtaaatgcaaatcaaactaccaatggtaaatcaactcaacaaaaggctactgcaaagcaaactcctaaaactcatattcctgctaaaagaattaaaaagtcaaagaaatgtactatcttataacacatgtgtattatagattcattcattcattcattatgtacatcttatcttattctctctatatttagatattcttatacgtttactttctttctttatttatttctcttataaatcatatacttcaagttaaattaatttacattacattatacaacaatatactctataatcctaacattttagctctatcaggatgaacaccaccttcaagaacatcttcaccattagccttacgtttatctgcttctgccttagccttcttatccttttctgcttgtaatctatttaatctttcttgttctaatttatcattctttgccttaatcttttcaactctatctttagaattaccacctccaccagctgttaattcaacattaattttcctccctcctaaaacacttttatgtaatcttaatgcaatatccattaatcttttactttcctttggatcttcattcttaaattcaacaaatgcacatcctttatcttgtcttaatctaatattacttggtttacaattcttaaaatgtgtattaatatcttcttcagttatcttaaatggtaaattaccaacaaataaaataaatcttggtccttcttccttttctttatcacctctatgtttcttacctctcctcgtctttctcttcttctttggtggcgcttctgcatctgcttttgcctttgcttctgctgcttcttgttcctttatttcttcttcacgttttctcttttcattctcttgaattaaattttcacgtgtctttaattcctctgctgcattggttgatgtcttagatttaaattttaatgcctttaattgcttcttactgagcttttcaacaacttcttctgtcatttgtctttgtgattataagaatatatacctgttcttgataatgaaacaaaaaaaaaataattagtttatcaaaaaaaaagttagtagatcaaatttttttttttcataatgaaaaacatgctaagtaaatttatcagcggctgtgctgtggctggtattgtctctttactatgtcctttcacttcatccattaatggcaagaagggtagctataaaccttaatcaaagagtcaggtctgatagaggagggcgtggtagaggacgtggacgaggaagaggtgggaatgttgcaaatattggacgaaatgatatacccaataacataaaacccacagaaactgaaaataatgatgaattaacaactaataatgaagaatcaacatcagaaacaacaactaataaacgtaaatttgatgaaattgatgttgaagaaatctacgatgatgaaataatgaatttaatgggatttaaatcatttgaatcaactaaaaataaacatgttaaaggtactgattgttatgcaattaaatttaatcaaaaaactgagtatagacaatacatgaatagagatggtggatttaatagagaattatcaccaactagacttgataagaaaaagataaaaatgaatttaaagaagaaacaaacgaagaaatctaaaaaggaatagcatcattaaaatatacgaatctattagaaattaggaatataaaaattactttttagctttaccaatagcaccaactttaagaaacaaacttacacagaatgcagaaccagctaatgcaattgcaaaataatatgaatatttcattgcatgtaataatgcaactggatcattattttgttgtggtgtaccataggcagaatattttgattgaataattgtactatctaaaccaattgcaacagctgaacttaattgtaaaatagtattaaaagtacctgaacctctactttgtaattttctctctaatgaagataatgtaactctatttgcaatattataaattaaatcagctccaacaactgttaaaataaatgcccaaaatggtccaagaaaataatttctatcaattgatactgttgcccaaataattgaagatcccagaaatcctaaacaaccaatactcattaaaattctaccaggtataatatgcattgtaaaacctgcaaatatattaactaatatacctgaaattggttgtgttaagaaacaacatgaaacaattataattgaataacctttaatattttcaaaatataaaactgcattataattcaacataccaaagaaaaccatccaacaaaaacttgcaataaccatacaaagacaaaaatttttatttttaaataattgcattggcattaatggattttgtggaacatataattcataaacaacgaatacaccgataaggaaaataccaactataagtaatgcaataatataacctgttctccaaccatgtggagcagatgtaacatcagttaatgagaaacaaattaatgtaaaagcagataatgataataatgcaccgatataatccaattctttgaaaactttcttacaatgattccaatcaattttattatcatttggtaagaagataaacaccaagatagctaaaaatccaaataatattgtaaagaaaaattgtgcagctctccaatcaattgcaataatacaaacaccagcaacgaaaaatccagctgcaccaccaactggagctccaataccgaaacaactcataaccatatttttcctctttgaatctttataagttgaacctaaaaatccagctgctgcaggtgttgaacatgcaactgaggcaccttgaaatcctctaaataaacataaaagaatataattatgcatgaaacctgcaataaatgaaaataaagcatacattgaaaatcctataatcattgcagttttcctaccaaaagcatcagcaataccacccattaataataaacaagcaccattagctaacataacacttgagacagaccaagttaatttcccaccatcaacatgaaaatactcacttattggttgaagcattgtttgataagctgatgaagccatacttgcagctgctggaccgaaaatacaaaggaaaacacagataaattcttgaaatgcacttttaaaaattggtggtctctgttcaggatctatatacaatgcagagtaattagttttctgtctttcaatatcattttcattaataaattcatcatctttttcagatgatgataataatttttcatcattacctaaataaatttcagttttaaaatcacgttctgaatcaaaagaagatgatttatctcttatagttaaatcattcacttgtatattctcattggcattattgtcactaatgtccgcctgtgataccatgtttatttgtagaacatgtacagattgagttcattaaagtaactaaagatcttttctgttttactgataacagtggaaaagtgtgaaaatttaaattttttaaatgtcggggaagatgaaagaaattaccggcggatgcggtaatcgagcggcagttatttagccacagtcataagttatataaattaagtagagtaaagtaaaggaaagtattttattgaacaagtaagtatacaatgttgaataatgtctatttaagagaggcagtgtatgcaagcaataactcatcgtatttagccttaagatctgtgtattcttgatcctttttactgattttatcctttaaatctgtgatagttttggaatctgcattaaatgtaacaccaccaccactactagtagttgttgttgaatcaactgaagagaagttagcaaagatttgttcctcagattgaacattattaatgaaagattggaaattccaatctgatgaattaatagttttatcacctgttaaacgcattgttaaacattgatttattaaatctttttcttcaataattgatctcttcaaaactggtatatttctcattaaatttttatcaactgtattatttaatttttcatcattatctttaacattccataattcaatattacaaatttctccaactaaatctttcatttttttacgaatttgctttgttgtaatatcaattacatataatgaacctaaattatcacctgttattaataatgtaccatcaaatgataatttcatacatgtaattttaatatctgaaacatctttatgattttcagcatgaacagttattgtatctaataattcagtatctggttttaatgtaattattttacctaatccaccaactgattcaattattttattttttggatttattttaaataatggaacgtatcgtatattaccattattcataccaatataaatagcacgcattgcaggatcacaaacaaatgaagtaattggatttgttgaaacaattgttgtaattaatttagctgatatagttaatgaataaattctaattgttgaatctaatgatgatgaaattaatttaatatcattatttaaacctttagtaaaagttaatgaagtaatttctaatgtatgatcagttaaaattgcataaggtttttcattttcattattttcattattattcataaataatgaattaattgtataaataacaattcttgaatcttttgaaccagttgctataaatcctgaatatgttgtaatatgagttaatggttgataatgtgcttgtttgacagatagtaataaacctgaatttaatgaccaaatatataatctaccagaatttgaaccacctaataataaatcacctttcatattattatttgaatctctataaattgttaatgatgttaaaatttcaggcaatggaataatttgttcaggtgattctttaccatatagataaacatgtaaaaccggtctctcaggtaatgcaactaataaatgagagccgtgaccaattgaaacattaactgatgcatttggtgatgatggacattgtctatattgatgaacaactttagttgtatgtaatgaagctaaataagcaaaagcagttgaatgttttttatcttgtggatttccacgtgcattatagaaaactaattcgtccattacgagctgttgattgaatatagtatattatccaagtcttttctaataaagtatagcagtaattaattaattcaaactgaaatttcaagataaaataaattttttttacggctaagctaaattttactgaaaattttcatgtcgcgttaactaaagtaacaattcttgagggcactgggtactggctcatcttgaaatgcattgatctacaggcagtaaaggaagatcggctctttcgttatttaagaaacaactcatttatatataaatcatgccattagattatctgggtgctgtctttttacataaaactcatactattccctatttagatgaacttaaaatttatgttccaccattaattttagcattattactaaaactttacacaaatggatcatcaaatacttgggagaggaaattacatggtaaagtctatattgttactggtggtacaagtggaattggtgcagcattagtcaaagaattagctaaaaatggagctcaattggttttattaacttcacaagttagtgaaaatgctgatagtagtgctaaaatttggataactgattatattaatgatttacgtgaatttagtggtaatgaaatgatttatgcagaagactgtgatttatcatcattatattcaattagaaaatttgcaactaaatggttagatagtaaacctgctcgtagattagatggtgtaatttgtcttgcaggtgaaagtttaccaattggtaaattaagaacaaatacaattgatggagttgaaattcaaatgggtataaattatctttcacattatcatttattaacattattagaacctgcattaagagttcaaccaccagatcgtgatgtacgtgttttattaacatcatgcgtttcacaaaatatgggagaaatcgatacaaatgatttattatggtcagatcgttcttatccatcaaataaaccatggagagtttatggtacatcaaaattacaattaaatatgtttgcaaaggaatttcaaagaagagtttctaaaattgaaagacctgataaacaaccatgtggagttagaattaatataattaatccaggtattgttagaagtccaagtacaagaagatttttatcatttggtacaatttgggggttaattttatatattttaatgtatccaatttattggttattaattaaatcatgtgaaatgggtatgcaatcatttttatttgcaattaatgcaccatcagtttatgatggacctggaggattatatatcaaagaatgtagtattattaaagaagttagaaaagaattacatgatgttgaattacaaaaagttttatatgataatacggcattattaattaatgaattagagaaaacatcagcacgtaaaagggttgctgaaaaggctaaagatagcagtggtaaagataagaaaaaagtaaataaagaagatagtgctagtagtaaagtatcacaagtatcagctaatcttgataagaatgcagtatttgcatcggcattcagtgatttaccaggttttgatccattaaagaatccattagggaccctgtaagatataagagtcattggcattacctaatcaccatataaaaatttcagtaaggcactagtaaatttatcccgggaaaagattagcgagtgagagaatttgaaattttattgggtgatatatagggggtggaacaataagagtcataagatattaacagttattattattagtcaacgattttccataatttttccactgagattgaaataaattaatgagtgtttccaaaagtttccagtttccagttttatactccgcatgaagtttgatcaactttattataatttttagtatttttttttaattattaaatgactaaaaatttcattactgttcctttcccctttcgtaaggaatgttttcttcttatcttaaacaatcaaagattttattaaaatctgttccatctttaagaatgtcttcttctttagctccacttgatgcaacaaaattaactataacaacaactacttctccaaaggaaaaattaccaaatgaaaaattagtttttggtcaaacttttactgatcatatgcttaaaattgcattctcatttaaaactggttgggcagcacctgaaattgttccatatggtccattagctcttgatccatcatcttgtgttttccattatgcttttgaattatttgaaggtttaaaagcttacaaagataaaaatggtgatattagaatgtttagacctgataaaaatatgattagaatgaataaatccgctgatagaatttgtttaccaacttttgattcagaggaattaactaaattaattggtgaattattaaaattagataatagatttattccatcagagaaaggttattcaatgtatattagaccaactttaattggtacatctgcaggtttaggtgttcatactcctgatgaagctcttttatttgttatttgttcacctgttggtccatattataaaacaggttttaaagctgttagattagaagcaactgattatgcaactagagcttggccaggtggtgttggtgataaaaaattaggtgcaaattatgcaccatgtgttaaacctcaattagaagctgcaaagagaggttatcaacaaaatctttggttattcggtcctgaaagaaatgttactgaagttggtacaatgaatttcttctgtgcatttaaagattctaaaactggtaaaaatgaattagttactgcaccattagatggtacaattttagaaggtgttactagagattcaattttatcattagcaagagaaagattaaatccagaagaatggacaattagtgaaagatattgtacaattgatgaaattgcagaaaaatcagaaaagggtgaattattagaagcattcggttcaggtactgcagcaattgtttcaccaattaaagaaattggttataatggtaaagatattcaagttccattattaccaggtgaacaatcaggtccattaacaaaacaattccttacttggattcaagaattacaatatggtgatgttgaaagtgattggtcaagagttttcaaaactaaataaatttagtttataattttattattatttatacattattcaatataataaagttttataaatcgaaagcgaaaaagctgtaaaaaatgaggtaagtaaataaaaatgatagaggcattttaaagtccgatattttttttaacattttttttttctaaccactaaaataataacgtcaaacgattttgattctttttttgttgagttttttttacttttacttttcttcttttctgtctgattctgtttttcttcacaactcctctttctttgtcttttcagaaaaactttttataatggaaactagaaatatcattaaccaattcatcaaacaaaatgagaaatttaaaataattaaagaaactcgtaagttaattactccaataactaatgaattaattattttagattcatcattcaatccacctcatttaggtcattattcaatgatcaaacaaagtattttagatttaaacaaaagaaataatattaacacttcaactattaataataaatcaattttattattatttagtattgaaaatgcagataagcaaaataatttaagtattgatacttatgttcatagaattaatatggttgatttaatgacaaaatatattgatcaagaacttggattagcttgtggtattggattaattaaatcaagtttattcatagataaaagtaatttaattaatgattggttaaatgggtatacatttgaaggtaaggaaaaaatttcacaatttttcttattaggttatgatacagtgattagattattcaatatgaaatattatccaaatagtgataatataaatgaagcactgaaaccattatttgataattctaagatttgtgtgtttttacgtaaatctgatgaaagtgatgaagatgagaaggaaattactaaacaaattgaatatttaaagaacttacaaaagttattgaatgatgaatctaaaattttaatctgtatgagtgagaatgaatgtaatataagttcatcatcaataaggaacagtgttcagaatggaaatggcgataaatcatggaattcacaagttattcgttcaattagagattacattaataaaaacggtctttatcagtgattgattacataatcacacacaatattaccacagacgcgacgctgagccgcgcaatgaggtttaaccagtacaccaaggggaataatattttttcattaaagtaattctgaaatttacacagagtgaaatgtataattgtagtgtagtctcagtgtaaatgagatactggcgagggtggtattaagggaaaattctggaaaatggaaaagaggacagcagagccgccacttgaatcctctcatagtgaaaatagaaataaaatttgccctcctcgctcagctaaccctcatttcctgtttactcagccctctcatatttgattaatacttgtttataagtgttatacaataatctcttattcaatagataagacaataaatatcacattaaggtctttatctatttaaagcacttgtctgtgaatttttaactatttttgtgaattttctacaacacatttaaattcaccccttttcacacacttatttactacacatttacacacactaaaaaaaacaacagaaaaaaaagcttttttttctctctcctgaattttccgaaatttcccgaaactataaaattctttgattatgtcatcaactatgaaaagaaataccgagttcaatcaacaaggtaagaactctaatgcaaagagaaggtgtattgttaaacaaacaactgttgcaacaacaactcctccatctactccttcaacagtaaatcgtgcatatttcccagtttctaaactttgttcatataaatctaaattaactagaaatgattcatttgatttatcctcttcagataataatgacgatgatgatgatgataaggacgaagatcataacgaagaatacaactcagatgtagagcttactaatcgtacattggtaaattctaatctctattctaatttaaatagtatcaataaaactttgaaatttgctccaattgatgctaatttatcaaaagcggtttctcaatatagtgatgaagaagttgaagatgatatcaatgataatgatgataatgatgatgatattactgatgtggaaagtaattatactgttaattctcatcgttctggttgttcaatttcatctaaaaagcaaagaagtaaatcatctaatgatattcttaatgttaattatggatcatcttatggtactttaaataataaaagatattcagttaatatcgctgatgttgttaaattggtaccttcaactgataaaaaggatgattctgaaatactgaagggcaatcaaaatataaatgttgataagaaaaatatcaacaacaacaacaataataataatagtaatatcaacaataataataataacaataataataataataatgaattatcaaataaaaagttcaaacacagtggtaatattccatcaagtgattttattgcaagatcacgttgctttgaatatttagttggtgcaattgatgaagcatgggctcgttattgcgattcaacgtctcatgatgaagatatcaaatatgaaaattataataattccgatgataatataaacaatactaacaataataacaacaataataataaaaattatattgatgagacaaacaattcatttaatatgatggcaaataccccaaattcaaatacatatagttcagatgatgatgatggttataaatctggattttctgaaacaactacagttactgaatatgatagtgattataataaaatcaataatacaagaggtcgttcatttagtatgattaataacacattaattggtaattattcaaataatcaaaaagttactgaagttccagaaaatttaagattacaagaattaaagcatcgttttactaaatcaaaatattttcttgaagatttagttgattctgatttatttagtgattgtattgcattttggactaaatgggacctaattaaatattcaattattgaatttgttgaggaagatgaagaagatgaagaagatgtaattgaatctaaaattgaagagttagaagttggacgttttgtattataagattcgaaaaatgataaaaaaaattagtaaattagaaaaaatggaaatgagttttgatcatttatagatggtattactcaattacaaaaatgtatattagtaggtggggaaaaaataaatatttttaaaaatcaaaaacaaaaaaagaattcaattcatatcaaattaaatatcatttcaagataaaatcatcaaataaaaaaataaaatataaataaaatatttttttctttgaagtttattgatgaatagaaattgtatagtagctttataacaaaaaaaaaaaaacaaaaattataaaatataacataaattaccacagtagtttaattcataatagtatattgataagcaaagtcaaaataaggatataaacgtataaaaactggaagaaagacaaaagttgatttaaaataaagataaaaaatgaatgaatgaattagtgaatgaatgaaactgtaaataaacttcaagacaagaccactaaacaggagttttaggtcttaattgctcaatttcatcatgatgaggtatatttgtaccaatagcattaatatcatttttatatctaactggatcaaaattatctaatataatatcaggagatgcaataacccaaccaggtctaacattaacatgtttattaataccagttgaagttggtataatatgtaatcttttcgttgaagaagagaaattttcgacaactttataaatttgtgaaggtacagcagaattaccagtttgattattttccaaagataaatcagtattaacattacaatgaattaaatcattatcagaagaacgacgaacagtaccagttatacacatccaacaatgccattgaacttcttctaataattgatcttcaggtattgaccattcctttggataataaacagaatttttatcaactggtatgaaaactaattcttcacttcttctaaatttttttgaccaagttctttgatcattcattaaagttgataattcactaattttttgagttgaagcccaaatgaataggaaaccaggttttgaacataatttatcaattggtaattgagctaataagggataaattaattgattttcagttaatgcaccaatcattataacatcaaattgtaattcataatcataaacccaagaatttaatttacttgttaaatcttgagttgaattaattttacaaccataaggtcttgttgcatattttaaaacttgttgttcctttaatttatataatctttgtaattttggataaccttcaacttgttgctttgcgttacgaatatatttatatggtaatttacctgaatgaatataattatttgtataatcatttttataacaattattccttacatttttattaacatcattattctctttattgtctttattgtctttattttctttattattgttattatggttaaaattatttttaacagatatattaatttgagttggcgttgttgctataataactggaggttgattataattagctaaccccatagttggtattaatttaaaagaagctgagagtggtgtcttaatatatttaccatttttcccattaccattaccttgaccattattattattattaaccatactacttttagttggtaatcttaatgaaaaagttgtatttggagataagtaacatttacctgaagcaagtggtggagatactctctttgtacgcagttgtaattgtaaatgtaatttatcctttgtatcccaggaaacttttttcttctgcttttgtctctgtatctctgacatagtttggttgtttaatctattaagaaagacacttacagacaaaaagacataaaaaagaggaagagccttcactataacctatacttgaaatcgatgagccgccgttgtgtttcatcgcacatttttaaaacagcgcgaaagtgtttcagtttcagagtggtggtattgtattgtattgtatggtattgtatggtattgtattgtatggtgaatagtggataggatctttgtctgatgttggtgatggacggtttggaatgtatgcattgtttgatgtcatattatttgtgtctctatttgtatttgcatttctttataatttacttaatgtcaaaatatcatttgtattacgtaatatattatttgtatctaaaattaaatcaattgattttcctaattgggaaatcatattgattttacaattatcaattaaattatctatgattacacacttaccagaaattaaaccgttgttctagaaacccagacaaagattgagattgaaagccttggtttatctagtaaaaagtaattatactatcttttaactgtggttagaataaaaaggaaaggcccagaacctagattgagcagaaaagaggtagcagaaaaacagaaaaacagcaatcacaggcagaaaaggtacaacactaattttaattggttactgttgggatatcaattagtgatccaaaacagtaattaacggataatttctaaggtacacatggtttattgataaatcacttttctttttcatttccatttttttagagtattttttgtataaatagctaccatttgtaccttttttcatttcaaattatttaatatcattatacttcttattcttatatattttttatcaagtaaaaaacttccaaaaacacactcttttaacaaatttattcactctttttaacaaacttattcatttttttttaaaatgttattcaacttatattcaatcgttttagctttatctactttaccagcaattaaagcatcaccaattgcagatggtgaaccaaatgctgatgttcaaattctttataaaactgttactatttgggatcatccagctgctattccaactggtattaaaattaattcagataataatgatgattgtgatgatgatgtttcatcttcatatgcttcatcttcatactaccagtcatcatactacccatcatcatcttatttaccatcaagaatcccagtttcatctgctttaactactcttacaactgtcactagaccagctacaactgaagaagcacaagttaccactgcagcagaagttgctgaaacttcaacagaagcatcaattcaagaaacaactaccactacaccatctactacttctgaatcaacttcagcacctacttcaaattctatctttgattcatccgttcataatggtgttgcaactttttatagtgttggagctgataattgtggtacatcatcaactgataatgattttgtttgtgcaatttcacaacaaatgtataatacagttgcaaatagtgaatcaatttcagaatattgtggtcatatgattaatttaacttataatggtaaaactattcaagttaaagttgttgattcatgtgcttcttgtgatgcaaatcatttagatttaagtcctgcagcttttaattcacttgcagatccaagtcttggtgtcattgatattcaatggacttgggcttaattttgatttaattaatcaatatttgaatcttgattttcatttattttcatacacgttcattattttataatttataagtaatttatcttacatttttttataccaatatattatataataaggttatttctgggtttcaaaatttttacatatactttatcgatttatttatttagtaatagaaaaaagaaaaaaatgatttaaataagttttgcaaaaacaaaaaacattcatttttttaacaaaatgcaactaatttattctttaacccaattttcaacatttgaagcaggagtttcaacaccatattgttttggaacataattaattctatgaacagaattaatattttttcttaaaacaatttgataacaagttgcagaaccttgtcttgaaataatggttgaagatgcaaggaaatattcccaaattctataccatttaacaccatatttattaacaactttatctttatttgaaatccaatttttataccatttatataaagttgaagaataatgaacaccaatattatcaacagaaacagtttcaaaaccagttgcttctaatttactaataacaaaatctaatggagttgaagcatcagcacctgggaaaatatatttattcataaataaaccccaaattaaatcttcatattgccaagattttctaatacctgaatattgtaagaaaaaatatccatcatcatccaataaatcataacattgttttaaataagaaccaaaatgtctaataccaacatgttcacacatttcaacagaaacaagtttcttatattttttatcaccatttgcaggtggtggagcatctctataatcacaacaaacaattcttgattgatcttttgaaataccaaatttatttaaccaatcattaccccatttagtttgatttttacctaatgtaacaccagtaactttagcattatattgagttgaagcataagttgcaaatgcaccccaaccacaaccaatatctaaaacagtttcaccagcttgtaaattaattttttcacaaataacttttaatttattatcttgtaattgttctaatgattcttctttattaatatcactaataacaccagaagtataaaccattcttggacctaagaaccattcatagaaatcatcacctctatcataatgatctctaacttgttcctcatcttgagatcttgtatgcattataacttccgggatcatacctaaaaggaaaaatttaaataaactcatagtaagagtaaatttaacccaatcatgtctaaattctaaaacatctaaagcatcacctttaaagctaactttattatcaaaatataattcacaaaaagtttccattgaaattttattttgacctttatataaatcctttaattcatcatcatggaaatctaaataatattcaacacctttatttggtaatttaactttttcatttaatcttggagaataagttgataaaagtgtccaccatgccattaagattggaattgctaaaacaacgaagaaaaataggaaagttttaaaacctaaacctaaagatcttgtaaaataataaggaattccaatcataattgataataagatccaattattgaaatctcttgaacctggaccatctgcaggtaatggagcattatgaattgcaggagaatttgtggttttaataccacaatcgtagttctttaaggcttccattgcttgtataaaagaagaaactgaaaagaagagacgtgtaagcaataatgaaaacacggaaagttgtccactatttgaggaaaacgagaaacgagaccaagttccagattgttgatttttcacactgccttttattgttattattattaaatatcatctgcatttaacagcatgaatagtacagatagtgggtgggatattagtgataggatcacctatttactatttgataatcaattaatcaatgaaacaattggtacacctatcctatgtgagatattgactataattttagcagttgttacaattattattggtgcacattcatcaattattcaaccaattaatgcaattgatccaaccaagagttcccaatatttccattcaagtgatattgatggtaagaaaagtgatgaaaaaattaaggaaaatcaaataacttggtcaatggttattatattaccaattatggcatcaatttcattaattagtatgtattattattctaaaaaattaaataatggttcattagaaatgtttatgaataaatatttaattataatgtcatttattagttcaagttttgttataaattatttatttaatgcaattaatagaaatttgggattgaaatttagtattaaggggaataatttaatggatgatagattttcaattactttaagtaaggataatgaaatacatccaattggattagatgttttaaatgttacattaccagataaaacagaaagggagaaaattatcaaggaggaaaagttgaaggaattaagaaatgatatattaattgatgatcaaattgttaattattatatatcatatggacaaataatttcaattatcagtgcaattattttcacaattatttattataaatataataataataaaaattggatacttaataatatatttggtttaatggttgtttcaatgggtatttcaaatacaagtataccaaatttccagatttgttcaattttcctaattttattctttctatatgatatttattttgttttctttacagagataatggttaaagttgcaactgaaattgaaatacctgctaaatttataataccaaatacagtttccaaaggtgaatcattaattaaaatgtcaattttaggattaggtgatgttgcattacctggatcattaattgcattatgtttaagatttgatttatttaaatttcatcaattaaataaggataaagaatttcattatttacaaccatatgataagagatattttattaattcaattattggatatataattggattaataattactgttagatttgttaaatatactggtaatggacaacctgcattgttatatttagttccatgtttattaattagtgtttatggaactgcaatttatttaggtgatttaaaattactgtggggttataatgagataatagaagaaaagaagggggcagaagaagaagaagaaggtgataaatttgagtattctgaagagaccaagatacttatcagtgatataccaccatatgatgttaaagaggataagttggataaagattacgattatgaagttgaatatagcagtagtgaggaagaggaaatttaaattttaaattttgaaaaaaaatattttttttatttcaatttttcacttttcactttacagtagtttttataattataaagaataagtagagtacagtagagtatagtatagtagagtatagtagacaacagacaatatgaaattagatacaacgtatatgagatatttaactcctgatgattggagggttttacaagcagttgagaaaggatcacataatcatgaagttgtaccaactaaattaattggacaaattgccaatttaaagagtggtattggtaatactaacaaagcaattagtgatttagctaaaattaatttaatttcacgtttaagaaatgcaagttatgatggatatagaattacatataatggatttgattatgttgcattgaaaacaattcatcaacatggtaatattgaagaattagaacatacaattggagttggtaaagagagtgatatttatagttgtaaaaccaagaatggagaagaaagggttttaaaaattcatagattaggtagaattagtttccgtacagttagaaataagagagattatttaaaaattggtaaaggtggatcatggatgtttttatcaacattagcagctcaaagggaatatgaatttatgagtattttatataggaatgaatttgaagtaccaataccatttgatgtttcaagacatttaattttaatggaaagaattaaaggattcccaatgacacaattatatgaattaaaagatattggtaaattatataatggattaatgaaatttgctgttaaattagcaaataatggattaattcattgtgattataatgaatataatattatgattattaataaagaagagagtggagatgatgataaagatagagattttgttgtaattgatttcccacaatgtattagtattgaacatccagatgccaaagaatattttaaaagagatattgaatgtattaagaaatttttcaaacgtagatttggatataaaccaatgaaaattgatgaaatgatgttagatgatgaaggatttggtaaaggatataaatatggatggccaatatttgaaagggatattaaaagaattaatgatttagatgttcaagttaaagcatcaggatatagacgtaaattaggagatgaagagagacaattacaagcagttgttggacaacaaggagatgatagtgatgaagaggatgaggaaggtgaaagtgattatagtgatagtgatgatggtgattatgatagtgattatagtgattatagtgaagataatggaataaatgaagaagaagaagagaatgagagaattattgaagctataagtagtggagttggtaatttaaagatggatgcattgggtaattatatattagaagaaggtagtgaagaagaagaagaagataagtaatttatgtactttataacctataaacagtaatttttaagattaggatactatttcataacatgatgatgataatggttatcactggaccgtcgtatagaaatacgagtcaaaaatgtatgacaggtgatataagatgtgtcatcaataagtatttactacaagatatacagagagtaacatatatataagatatacaattatatagtcatcaattatatcggagattaattaggaatcaatccgtataggaatgactaaagtaaagtttaagataagctcagagtagtgtcatatgattttgcattacgtcggggagatacaagtaaggtttgaaacgtcatgaagcatgtgtatataaatactccctactcctccattagtagttatctatttaagtgataaaataaataaaacttataagcaattagtcaaatttatttcattaataactgctaattaaagaatatagaaatagattatattattaagcttacgtaatacacaagtcacgtgaccacgcgggttttaaaagaataaagactctgcttcccctcactcttaacaccgttgaagacccttaaaattcctctctgttagccaataagagctcttgaaatgaaaagagggggtgtgaaaaaatacatgtattatggggtatagtatatatagggggtgtacatcgatttatttaacagtttatatttaacagtctattttgatgagatgagtttataatatgatataatataatataatatattataaatataccttgtaaatatctacctactttcatcttctattactcaatgtatgtgtagtagtatagtaatctaatcactttatattagtattatttactatcaaagttaatatttaatttattatttcatatatttacttattgttgaacgtttttattttttaatcttttcatcgttttattgttgtatattactcataacccgctttatatcttcatattttagggagtataaaaactaattaattccccacttgttatattatatctttatttttcattatcttcttatcttattatcttacctattttaagcttctttaaaataattttaacttaaattttatatctcttccttaactaaacaaaaacaatgttctcatcaacatttaaaagacaattaactaaatcaattagatttcaatcaacttttacaattccaaaaactcaaatgggtgtcatttttgaaactcatggtggtccattacattataaagaaattcctgttccaattccaaaatcaactgaaattttaattaatgttaaatattctggtgtttgtcatactgatttacatgcttggaaaggtgattggcctttacctgctaaattacccttagttggtggtcatgaaggtgcaggtattgttgttgcaaaaggttcagctgttaaaaattttgaaattggtgatttagctggtattaaatggttaaatggtagttgtatgtcatgtgaattttgtgaacaaggtgatgaatcaaattgtgaacatgctgatttatcaggttatacacatgatggttcatttcaacaatatgctacagctgatgcaattcaagctgctaaaattccaaatggtactgatttagctcaagttgcaccaattttatgtgcaggtgttacggtttataaagctttaaaaactgctgatttaagagcaggtcaatgggttgcaatttcaggtgctgcaggtgggttaggttcattagctgttcaatatgccaaagcaatgggtttaagagttttaggtattgatggtggtgaaggtaaaaaggaattatttacaaaatgtggtggtgatgttttcattgattttactaaatattcaagagatgaaaatggaaatgaaaagatgattaatgatattaaaattgcaacaaatggtttaggtccacatggtgttattaatgtttcagtttctgaatctgcaatttcacaatcatgttcatatgttagatcaactggtaaagttgttttagttggtatgccaagtggtgcaatttgtaaatctgatgttttccaacatgttgttaaatcattacaaattaaaggttcatatgttggtaatagagctgatacaagagaagcattagaatttttcaatgatggtaaagttaaatcaccaattaaagttgttggattatctaaattacctgaaatttatgaattaatggaacaaggtaaaattttaggtagatatgttgttgatacagcttattaaagaatgtatttattctatttaaattagattagatatagttagataattagataatttacttagtcttacgtaaaatacttcgtctttatctatataacactcttcttcctatcctaaacacacacagacacactccactacgatgtctacatgggatcagaaaacattttcattctctccaagagcaagaggttgttatttagtaactgatgaaatttacaataatttgccatttattaaagattataaaattggtacattaaatttattccttaaacatacatcatgtgcaatttcacttaatgaaaattgtgatcctgatgtacgtattgatatgtcaactgcattaaataatgtagttcctgatgataatggagaaattttcaatcatattgatgaaggtagtgatgatatgtcaggacatgcaaaatcttcaattgttggagtttcaattacaattccaataactaatggtaaattagccttgggtacatggcaaggtgtttatctaatggagtttcgtaattacagacatacaagatactgtgttgcaactgttcaaggtattaaataaagtcttctattagtataacttacgtaaataaatttttcactttaacattcaatatacttcttttgataatgttacgtagatatattggtaagatggttaatagtaatagtaacatacagaatgagaaacaaatgtcttataatgatggagtatcagttatgaaaactgcatcagggttaattaaacaacgtaaaggtcaaagtgaagatgaatatttaaatgaaaaattatcattttggtcaaatggacctgtaattcaaaatcatacctatgtaactgattatatgaaagaatatttgaatagagaaactacatcttcatttacggaaataccaaagattgaaagagagacgttattacatggtttagagagattatatttccaaagagattatgaaaattgtttaaatgatgttaataaaatacttgaagagattaaattaaacaatccaaatctaaatcaagagattgatcttaagaagaataagaatattaaaagagtttataatcaacttgttttactatcaaatagatgtatatctaaacttcaagatgaaaacattaaatcacttgaatcacaaaaactttactaaatatatataatactatacattaattaattaacataaattctaatttcaacaccaccaacatttctcttctgtaaatcactatcatcatcctcctcttcttcctcttcttcctttacaaactcatctaaaacaccgacactctttgtaaagaaatcaacattaaatttttcatcaaatttaaacttcataccaatattaattactttactaatagctttacccatacctttaactgtaatataattacaattcatatcaatattaccacgtcgtattaaattacctctcttattcggtatattttcaaaattaattaacattttttcaattctcttaacagctgaaataaatggtgtcttggattgaatataaacagttgtatctaattcattatgtctgtagggacgtaatggtgcatgcttgataagtcttttaccgttgactatcctattagattctttcattgtcgtaatataaataaagaagaagttaagagtatgatataatacatagcgaggaaaattcatagtgtatacatgttgattctatgatgataccactttcttttgggataatgacggttttaatgaagaatgatgataagttaattgaatatgcattgggatcacaggaatatattgatcaatttattccaattattaaaactgaattattaaacaatgattcacttgataaattaattgataaattacaattattaaatgatgataaagaattagaacttcaagatatatcatttaattcaattgataatataactaaatcaattgaaattattaacaatattgttaaatcatctgatcaaattaataatcaattagttataacaagtaaaaatataagtaaatcaggtaaaaatttattagaagagagaaagaaaatattaaatattaatcaaataaaggatagaattaatgatattaatattaaaattgatttatgtttagatgttcttaatacaactaataaaatattagaattggttaaaagtaaagatttttatagatcattaattttacttaaatcattaaataataataataatttaaatgaattgaaaaattttgaatttattaataaattttataatgcaataccatcatttgaattattaattattgatgaaacttttaatcaattaaatagatggttaaatttaaatattgaaaaaaattttacagaatttggtgaattattatttgaaaatttccaattaattaatgattcatggtttgaaattcaaattaataataaatcattgttaaattataaagttaattcatccgttgaaaaatcttttagaattgatgaattaagaacttttaaccccttggataaattaaatattaatttacaacctttattacattcaattttagttttcaaagaattaaatcaattaaaaattttaaaagattatttatctaatgatataattagaagaattgatcatttatttataccaattaaagattcaattacaaaattaaatgttttcccaagtaatgaatcattgaaattaaatatttattcaattatatcatttacaattattgataaattaattaatgaaaaaattaattatcaattaagatcaattgatgaaattaatgaaacttttaatttaattttaaaaaaattttcaccaattttaaataatcatattgaattttatagttttgaaattgatgaattaattgaaattaatgaaattattggtatttattatcaaatacttttatcgaataatttcttaaattgtcaaataatttatgaaaaattaatgattatatttgataaatatttaaataaattagtggaaaaatttaaaaaagattatattaaaatatcaatgaatgataatttacaaccaattattatttcaactgaggatgaatttaatcaattagagaaagatacattttatttaggtgatataagtagcaataataacattaaaaaattcccattaacaataccaatttcatcaagttatttgaaaacaaataaattattaaatcaattcattaatgatatttatgaatttatatcaaaatattatattcatgataataatttaattattaataaaatttctaaaagtattgattatattttaactaaaattatattaattgatttagatgataaaataaaatcaacatataaagaagttgtttcacaaaatttaattaatttagattattatttaatatcaattgaaaaaattgaaaattatttaaatttaagtgaagataatttaaatattttaagatttagaaattttacaaatttaattaaatttcaatcaattaatgaatttaaacgtagtaggaaatctgcaattgaaagtatgtttaatatgattgatttaaaaattttttcattatttgatatggttgaatttaattggaatagtaatgaatttaataatcaaccaaatacaaatttaattgatttaattggatttttacttgattcatttaaattaaatttttcacatttaccaattagtattaaatcattattattattaaaaattttcgataaaattagtaaatttttaaatgattcaattaatgaaagttataaaattacaaacaattcaattaaaaattttaaaattgatgttgaatatgttcaaaattctattaatttattttttgaaaatgaaaataatgttaatattgaaccattgaaaaatttatttaataaattaaatcaaataactgatttattaattgatggtaatttagaatattataaaaatgatgaaattagaattagaaaatttaataagattgaaccagaggaagcaatttatttattaaataaacttaaagacgatgaaaataataatgaaattgaacaacaagaggaaagtatagatggcaatgatgatgatgatactatatcaattttcggattgaaaagatctacaactttctttaaaaagagttaatgactatatacgaatattatataaacttttctttagataataacttagattcgaatggtaaccaatcactttgtttattaggtatcaaccccattgaatttaatttccaaataccaattattaaattaatcaaacaagataataaataaactaatttcattaaaattaaatcatattcatcaacttcaccatcaattgaatcatttaagttattgaatttcccattaattaacataatttctttaaaagtattaatgaataacattgctaacatcataattggtataatttgtacatcattaggtgacatataattcattacaatattcattaaaattgaactataatttgatcttgcaattgtccataattgtgttttcttattattatttaattcagcattgtatatcttacctgatgagttagttgatgtagttgtagttgtaacatacgtcgttgtttcgctatatcctttaggtgttataatttccttattattggtattgttcaagcatttatcaacaagtgaatcttcttcgtcataggggaacattgtagtataaagagagagtgtgtgtgattatgaatagaataatagttattgggaaaagaacagttgataaagtcaagtttattaataatgtatttcaattccaagacgacgacgagcaattagaatcaagttcacaatctggtgttgttttaagtagggaattgtctacgaaatactataatataccaatacaggtgtttattgatgaatgtgatgatattagagtatggattaatgagttaatggatcttgaaatgagagaattacgtgatgaattacaggcaatagttatactagacattgatgaagatgatgaatatgaagatgaaattgataaattgtatgatttattaagtaaggaacatttagagaagactaatcatgatgatatccaatgggatggagaggttatagttatcaatggtgtagatgatgacaatataagggaatgtcaatcaatgattaatggtattgtatggcgtgagagagaaccactaagtgatacattggataaagatactacaattgatacaatagtgaatcaaataactacactcaagtcccaacaccgttcaatgacgacagatgaggtacatcaacacgtcaccagtgtcgttgatcagctactgaagcaataaaagctataacaagtcccttaatgagaattaaattttccaccttctcttattagatgtttctttccaatcaataaaatgtttcaaagaagactattacatacaattaaatacgctaaacaacctcaattataccttcatgaatcaataacttttacaaaagtttcattctctaaagatccaaataaaattcatattggtgaagtaccttcaagttcagatttatccaaagtgaacattgaaccatcaaaatttatggaaaattcaaaatttaaagatattttacataaaactattgctaaaaatatttatgatgatcaatcatatgtaattgaagcaattaattatagaggttcatttatgccaattggtgatgaaaaagttattcaagaatatatgaatcaaagacctgaattaccaaatacaatgggatttgttcatgttgataatgatggtataatggaaaaaggtacttatgaagtaaatgatacatatacactgtgtaatgttgatggtataattaaattacctgaaacaatgttagaacatttacttaaagctttataatgataatgataataatgacactatacatattttatataatcttccagaatattaattaataatgaacctttatcattccaatcaattacaatatcttgtaaattactatcacaagtcataattaacagatctaaaaatgaaaaaaatggtaattcattttgttcattaagtgcaataattattgcataaattaatttatttttattaccattaaagaattcattaaattttggacatttattataatcatcataagagaaaataattgaaacttgttcaatataattttgacattcatcctctttaaacatttcactaatttgatttatccttttaatacattcattaatttccatacctgtaatcatttcataaattaatgaaacaattcttaatctaaaattaattttcctatatgttataaagaatgaattatattgacattctaataattttttaacttcattaaatttatttaattgtatcatttctctaatttgctttttcaaatggcataatccttcaggttcttccaaagtacttataataattgattctctatttaatttttgcatatcattttccattccttttaaagtatttaaataacctccatatttcaaatattctaaaactaatgaatcagtatatttaatcatatcaatattattattatttttaattataacatctttacttacattaaaaggttcaaattcaaatttattaattatatcttcctgtaattgaaatttatttaatttaacataattttcaatatcaaattcaaattctttatctttaccattaattccaaaattaatttccacattacaccatgaacctaaactaattattggtattaaacctttaatattttttttaccttcaaaacttttctcaaaccatttatcaattgaaccaatttctttaattaataaaccatttttagttaaaaatattaaatctttaaataaattataaccaattccgattatatcatttttaccaaatttacaaatttcacaatttttcttatttggatcccaaattgtaaaattacctgttttaccattccaaccaacaattctatcatcattacctctcatatcaatcattatatttaatgatgaattagtattattattggtattatgatgatgattacgattaatatttttaatttcatcctttaaaaatcctataactaaatcaattccattatctttaccatcaattatctttaattcataataataaatacaaactaatggtgaaacaattgaattaaatggtacagtaagatatccagatttttcattatttaatctaggataaatattaaaacttggattatctaataattttgttgaaattgtatttaattcataatcaattttaaaatctaaatcacttttaattttatcaaatttataaggaattgataaatttttaaaactttcatgatcattatctttattatcatcaataacttcatcaatgttaagatttaataaattatttaaatattgattatttttaatatcatttgaatttttaagaaatttacatggatttttacctaaataaccattagttgataattgtaaaattttacgccatcgaattgtatcaggtaatatatgttgattgtttctcttaatttcatcctctagatgattgttaatgtattgaaatgatagatatgtgggtattgtattcatcctatgatgttttgtccaaaagaaaaaggactcatcggagtagaaagataatacaatagatagcgatattgatactacaaatttactaaatttttgacccgttgaggaggatttttaacctcgtcgtattaaattaatatacaatgatttcatttatgtaattgagttattgcagttgatgcagtttaactttaatgatataaagagagtatcaataagataactagtatctgtaatgatctggtttgtaaggaccttgttctggaattgctaaatattcagattgaacatttgataatttagttaatttaacacctaaatgatctaaatgacatcttgcaacagtttcatctaaaatttttggtaagatatgaacaccaacattgaaaggaccagttttttcaaattctgggtaagtagttctaaatttttcatcatttgccttaaataaagcaatttgagctaaaacttgatttgagaatgaacatgacataacgaaagatgaatgaccagttgcacaaccaaggttaactaatctaccatcagctaaaagaattaaatgtttaccagatttcattaaaaatctatcaacttgaggtttaatattaatacattcaactgcattatcctttaaccaagcaacatcaatttcgatatcaaaatgaccaatattacaaacaattgcatcttctggcatttgttcaaaatgtttaccagtaataatatctctacaaccagtagttgtaacgaaaatttgaccaattttagcaacatcatccattgtatcaacttgataaccttcaactgctgcttgtaatgcattaattggatcaacttcagtaacaataactcttgcacccatacctcttaaagccattgcacaacctttaccaacatcaccaaaacctgcaacaactgcaactttacctgcaatcataacatcagttgctcttttaataccatcaattaaagattctctacaaccatataaattatcaaatttggattttgtaactgaatcattaacattaatagctgggatttttaaagttgcatctttaaccattttatataaattatgaacaccagtagtagtttcttcacttaaaccgaaacaatcatttaacatttcaggatatttttcatgaacaattttagttaaatcaccaccatcatcaagaattaaatttaatttagcattatccttgaaggcaaataattgttgttcaatacaccattcatattcttcttcagtttcacctttccaagcgaaaactggaacaccagcagcagcaattgcagcagctgcatgatcttgagttgaataaatattacaagaagaccaagtaacttcagcacctaaggcaactaaagtttcaataagaacagcggtttgaatagtcatatgtaaacaacctgcaattctagcaccctttaatggttgagaaggaccatatttctttctaatatacattaaacctggcatttcattttcagataattggatatcttttctaccgaaagcggcaagagagatatcagcgactttgtaagtagttgaaggagcagatgacattgttacctaaatgaaagacagaataatagaaactaaagtaaaagaagagccaaaaagaaaatagaacataaaaaaaagtggaaaacctaaggcttttataaaagtcctctatctatacatgtgaaaaaaaaattttttcataaattcataaattcattaattactaccatgtgaattattactattttattattatacgatttatacgagtagtttattattattattatctatctgttacagacgcatcgactgtatgggggggttataaagactatactatactatcctttactaatcctgcactgaaccatcccttggtctataactaataccttgagcatttaaatcattccttatatcatcaggtaatttaccaacaattctaactgcataaaatcctgaaacaaaattttcaattcttaaccaacgacttacccatgattttgaactaccattcattgcaactaatccttcaaatgttggtgatgtacattctcttataacatcttcattatcttgataatgtaaaactgattcacaatttggacatccttcatttctaaattgtgtcatactttgaacaactccacataaaaggcatgctctatttaatttcggggtggtacgtgttctcttttgtccaactgatgacatattatttgtttatttgtttatttgatatattctatatgatctatatgataattcatatgactataataaagatataatgatacaactcatacagtcattatacccttagtaacactctcgcatgaaatgaaattttcaaatcttcgttacatgtaattttcaatatgcacttcctattacggtaatttcaattatatcaattccatgcacactttctttaatctttattaatcaaccatacaatatacaatgtttaatacattgaaaagatcgaatcctctaaaactaactctaataacatcacccatattaagaaaacccctttctttatcacctcgtcgacatttttcatttcaaccaataactgaatcacttgatcatgcatctgaaatgcttatacaaattcatgctgattcaactctaccttggtatattttcataccattgatgactttcactttacgttcatttataactttaccaatatcactttatcaaagaaaaaaattacgtaaacaaaatgaattaagaccaattattcaagcaacgactcctgttttacgtgcaaaattagcttcaattgcacaaattgaaaattttaaaaatccaaattcaaaatctccaattgctcaattaactgctgataaaattataatattatctgcaaaggaaagaattaaaagacaaagaaatttatttaaaaaatttcaatgtcaaacttggaaaatgtggttattacctgcaatccaattacctttatggatttcaatatcttatatgtttagaaaaataacgggttggtcagatatgagtcattctaatattgattcttctttaattaatgaacatttcctatatttaacagatttatcattaaatgatccttattttattttaccaattacattaggtataatttcattatcaaatgctgaatggaattttaaaactgctcatttaatgaatttaacttcaaaaggtattaaaaataatttaagatcaactccattcgatgttattataactttatcaagatcttcacttattttccttacagcaatttcaactcaagctccagctgctttagttatttattggatttcttcaaatttttattcattaattcaaaatattttacttgataaatatttacctctcaaatatactccttataatagatctgattaaatttacttgtatatatacctctctatattaaacttactatacatactaaagtgctttaaatttacccagtttataacttttaaaatatttacctaatttatcatcatttaatagtattcccaatacatgtttactacatcctttacaataatcggggataaattgatctccatattcattagaatacacacaacaccatcttacaccacttttgtcgaccataacattagtaataactccatatgatgtatttgtacaaagaattctgccaatgaattctctactaaaatcttccatataaccaaattctaacatattttcaaaaagactgttacatttatccattgaaaataatctttttaatgggagtgtaaacccattgccaaattcttcaatgacatcctcaaataaacatttattgaataaattgattgtatggggtaataattctttctcatacactaattttattatatttgaaattaatttcttatcaatatctttaccaacaaatgataattgtgaatgtattctaccatgattaaatgcaatcatatgtttagatttcactgaatagttgattttactagttcttaccttatttcttttattcaatgatgcagatgaataaaaaatattttctaatttagcaacaccaaaaccattttctcctttaaattcaataattgaatggttatccttttttataaacaaatcaaattttaatttattatcccttccaaataatctataaatttttctatcttcattttcaattaacatataattacaatgtaacgaaatataatcaccaagaccaacaagtaagcatattttactaatagttaacaatattaatgggaaccgattgtcgaaatctcccatatataatcttgatagtaaccaaacattatcttgggagtaatttgtatatgaatcatcagatttgaaaaatcctgatcgtttgtagaatttctctaataatatgtcactaattgtaattactttattgacatttgatccataagtattatcaaattcaattgaattataacgattgattgtttcatttattatcttatctcgtattaataaactatcataaaataatggatcacataatgaaagtagtaaataatatggttcataatctttaggtctatccaaatgacgagttttttttgctttaagaaacttataaaatttccttgaattataggcttcaattatctttgatgcaatataaatacgacgtaaattatttgatctttcatttatatatgaatcaaattgcttttgtataactaccaatcttccattaatttctttaaaatcttcagacttaaaatgtcttacctctttcattaattgtggtaaataaaatctaaaattcttataaataccttcaagtttcaattgaacagaatttaatttattttcatttaaatcaaatatgtaatcaattactttaattacatggtaatcattaaacttcagctttctatataattggtaatatgaaccaaatttttcatattcatttgagtcatcatatgtcagtgtttcaaaattgtaaaatgttaaaaaccaatttcgtttaattgtatctttccaaattatatcagatttaagagattccattcttttggaagttttaatcaaatttaataaatcattatcatctaaacacacactaattttcttccatatctctataggtaattcatccagcattagctcattatcaaaagaaatgatattgttataaagttttcttttttgtgccgactcttgtcagtattgagattgaaggctcatttttcttagccttacagtaatacctttttaaacgaatggttacgtaagatttttatatgtacattaatgctcaaagtggtagtcattcaagttattcccttcctaaggaatgtgaccttgatattgtactcaggtgttacaactgtgcctattattattcagtttcaacatagaaaattgtagtttaaaaacaaagtatttaagaaaaactaacaaaaaataagattcaatagtacattttaacattgactaattcaataatcggagtaacaaaattctattaattaatctttctttatcaatgcaaatattgatgcagttaaatatacacttagtagtaattacttaagtgcttcaaatttcccattatcaaaacttttaaaatatttacctaaattatcatcacataaaagtgcattaacaaaaggtctagtatctaatatatgatgatcatttaattcaacatgctcctctctaacaaattcttcaccaaaatcagaagaataaataaaataccatatcttatcatcattggacctcattacattaataatagctccatgaattttccttgactcaattaattttccaataagtgatttattattgatttcaacaaaactttcttctttcatcttatcacttattacactaatattttccttttttaataaatcatatataggaaaaaatatttcaaatgaaattccttttatttcatccttaaataaacatctattataaaatgtaataaaatctggtccaaatttattttgataaacaaattctaatatactataaaacatttttgaattgatattattaccaatgaatgataattgtgaagaagacttatatatattttgacttatcatatgtccatgtctctgtgaatctctaatttgatttgctttatactttctcatatattcaaaccatgcagatgatataaaactactatcatagttatgtacatccccattttttccattcaatgtgtagtttaaattagaatcttcactattattatcgtaattatcatcagcatccttctgtaaaatttccacttttaacccatcagactttttgaataatctataaatattcttattattattctcaattaacatataattgaaatttaatgaaacaaactgtcctaaacctacaagtgaacatactttttttattattaagaataataatggatatagttgttcatcatctcccatatatacacttgataataaccaaaaatcttcgggagtttcagtttcatcttctccaattaaatttttaattattcctgattgtttgttcaaattctttattagtatttcactaattttaagaactttattaacatttgatttacgatcattctcaaaaattcctaaattatattcagaaattgtttcattgataattttatgtcttattaataaactatcataaaataatggatcacagaatgaaaattgtaaataaaatgtttcataatcttttggtctttcattatcagtcaccatttcaaatgttttaagaaactcataaaacttcttcaaattaaatgattcaattatctttgaagcaatgtaaattctacgtaaattttttgatctttcatttatgtgtgcatcaaattgtttttgtgtaattgccaatcttccattaatttcattataatcatctggtttcaaatggcgtagttctctcattaattgtggtaaataatatttaaaattcttataaataccttcaagttttaattgagcagaatttaaattattttcatttaaatcaaccatataatcaattactttaattaaatgtaaatcatcaaattttaactttctaaataattggaaatataaaccatatttttcatattcatttaaatcattataagtcaatgattgaaaatcataaaatgataaaaaccaattttgtttaacaacatctttccagataatatccgatttaaggaattccattcttttggacgtttggattaaattgaataaatccttaccgtctagatatccactaatctttttccatatctctataggtaattcattcaacattagttgattatcaaaagaaaaataggtaacggtatacacacttatatccttgtgggtcacattgacggagtaaaatcattaaaaaagtacaaatgtcattacgtaagatattcatgtgggaaatcattttactacttctattcgtatatattaatctagtactgttgaaactatatacactctttttaaacaactgacactgactggttatagttatataatgctagcaacatgtaataaccaaacatttaatgaattagaacacaataatatttcagtgctcccagtagtttatgggcattccgcagtagcttttttttcaactgccggtaataattctcaactcccagtagttctttttctggtattatctctacaatcaaaatgtcttaaacttgaaggatattatattcattgatgtaattattggagcacttaaatataaacttattataatactaaagtacttcgaacttcccattatcaaaacttttaaaaaatttacctagtttatcatcacataaaagtgcattcacaaatggcttattatagaatatatcaaaatcagtttcatcaaatttgtcctctctaacaactcctccataactatggctagaatatgtacaataatataatgaatcattttcattggacttcataactttaataataactccttgtttactcatcgtatcaaaatgttttccaatagttgatttatcatcaacttcataaaaatgatccttcttcaattcttcaatcattgtagtagtagtttcctttctaaataactcgtttaatgaaaataatttttcatctgatgatttcttcatttcatccataaataaacatctgttgaaaaatgtaataacttcaggttctaagatatcccgatgagctaatgctaatacacgtataatcatatatggattaagattattaccaataaatgataattgtgaaattgctttatacatggttttatttatcatatgtccatatctttttgaatctttaatcctatttacttccaatattttccgacgttgtgcaaatacagatgaaatgaaaatactttcgtattcgtaaacatccccattctcaccattcaatgtgtaagttgaattaagatcttcattattattgttattattaatatcttcattcctcctaaacactctagcttttaaaccatcaaatcttttacaaaatttgaaaactaccttattttcattctcaattaacatatagtcaaaatatagtgaaacaacttgatccaatcctacaagtgaacatattttttttattatcaaaaataataatggataaggatattcataatctcccatatataatcttgataataaccaagcatcatcgagatcattaacatcttgttcaatatagtctgtaataaatccgtcttgtttttctaatttatttatcaatattttaccaattttaaatactttcttaacatttgatccatgactagtttcaaaatcaattgaattgtattcattgatcgtttcatttattatcttatctcgtattaataaactatcataaaataacggatcacaaagggaaaattgtaaataaaatgtctcgtaatcctttggtctttcactatcagtcattatttcaaatgttttaagaaactcataaaatttccttgagttataggctttgattatttgtgatgcaatataaatcctgcgtaaatttgttgatctttctttggtatatgcgtcaaattgtttttgtgtaattgccaatcttccattaatttcattataatcatctggtttcaaatggcgtagttctctcattaattgtggtaaacaatatttgaacttcttataaataccttcaagttttaattgaacagaacttaatttattttcattcaagtcaatcatataatcaattactttaatcacatggtaatcatcaagtttcaattttttgaataattcaaaatatgagccatttttttcatattcagttgaatcattataagttaacgattcaagatcataaaatgttaaaaaccaattttgtttaacaatgtctttccaaataatatctgatctcaaaaattccatccttttggaagttttcattaaattcagtatatcatcactatctaaatatccactgattttcttccatatttctataggtaattcatccaacattagttgatgatatcaaaagaagtgtccttattatttaagatcttcttctttgtggggggcccaattggtgaaataaaaggttaaaaaaatatgagatgtcattacgtaagatgtttatgctgacattatcttcagttgctatgtgctttacaacgctaatccataatttgatgttacaactgtacctattattaaatatagaagcttaaaggaatgctcatcattctacaattattaacaaaaaaataattcaaaacaagctgagtcacttccgtagatttcaattacaatgatatacaatttggaactacactaacataaagttgagccccctaatgtaaacaaatgatgcatgtaagcaaaaaaaatcacaattttgactgtttctaacaactttctctggtattaactctatgccctaaaagtctgaatttttgagggatctaatctgtgctgtatcaccaaggtttaaaaataattaagaacaagggaaaggattaaggcctatgaacttacctgattcataacttctaaaatatttacctattgaatcatcacttaataatgtttccaatacaggtatattatctcttgaattgacaacatcatcaccataaatatatcgttctccaaattcagtagaataaacacaatacccaagttcttcccaccttgaactcataacattagtaacaactccatatgacatctttgtactaataattgtaccaattaatggtgaagtaaaatcatctaaatatccaagtagtaaacactgggaaatcagatctctatgtttctcaagtgggtataagaaacttaatccaaatgcatcttcataggatttttcctctatttcagtcttaaataaacatttattaaataaattaattgtaggggttaataatactttctcatacactaactttgttatatttgaaattagcttcatatcaatatctttaccaacaaatgataattgtgaatgaattctaccatgattatttgtaatcatatgttcatattccactgaattattaatcttacttattctttccgtatttatattatccgttaatgcatatgaaaagaaaatatcttcatattcatgaacttttggactatttttaccactccactttttaattaaatgattattttccacattggcaagccttctaaatattactaccccaaatccattcttttttctgattagtccataaacattcttattttcattttggaccccaatcaaatcagaacttagtaaaatacattcacgaattccaataagtgaacatattttaccaataatcaagtatattaatgggaatggatcatcgaaatctcccatatataatcttgataataaccagacactatttcctgaatgatttgtatatgattcatcaaccttaataaaccctgattgttttttcaatttctttattaatattttaccgattgtatatactttactaatatttgatccataattatttccaaaatcagttgacttatactcatttattgtttcatttattatcttatctcgtattaacaaactatcataaaataatggatcacaatatgaaaattgtaaatagaatgtctcataatctgttggtctttcactatcagagaatacttcataaaatctaagaaactcaaaaaattttcttgaattaattgatttgattatctttgatgcaatataaatcctacgtaaatttgttgatctttctttggtatatgcgttaaattggctctgagttattgctaaccttccattgatttctttaaaatcttcagcttttaaatgtcttgattctctcattaattgtggtaaataatatttgaacttcttataaataccttcaaggtttaattgtgtagaatctaatttatcacgattcaaatcatccatatgatcaattactttaatcacatgataatcatgaaatttcaattttctaaataattgataatatgaaccacattttttatattcatctatatcatcatatattaaaaattcaaaatcataaaatgttagaaaccaattttgtttaacaatatctttccaaataatatcagatttaaggaattccatccttttggaagctttaataagatttaataaatcattatcttccaaatgctcactaatatccttccatatttctataggtaattcatccaacattagttgattaataaaagcaaattactgataacggtacctctctttgtggggtctcatcgatgaaataaaaggttaagaaaatatgagatgccattacgtaagcttaagggattatgatgtatgataaggtatttattaaaacattaatagaaagcagtgaagaattagagaacgtaaagtaaataaataggtaaatatatgtaagagacaaacttcaacgtattggttttaatatttcatcatataacattttctttaattgtaagatatccaattgatctttctttttatcaaaatcaaagaaatcatttggtaattcatttgcaattggttcatcatttggatcatgataaaatgcaacataaggatgatttaaagcatctataacagttattctatttttagggttaaaagttaataatttttctaataaatcagttgcttgaggatttgcatttggtaataatttactaaagggtattttatcagattttggtatcattttaatatattcttgagctcttcttgatttaattgaattaaaatcttccaaatttggggtacctaaaatatcaattattaattttaattgattatgataatcagaacctgggaataaaggtttacttgataacatttcaaataatatacaaccaactgaccaaacatcaattgcagttgtatattcttggaaagttaacataatttcaggtgctctataccatctagttgcaacatattcagtcataaaaccaaaattatcatcagttgaagcaacagatctagctaaaccaaaatcacaaattttcaaatcacaatttgaatttaataataaatttgaaggttttaaatctctatgtaaaacatttgcagaatgtaaagcttttaaagctcttaaagtttgataaataaaatattgacaatgattatcacttaatttttgagttttaattattctatgtaaatcagtttccattaattcttgaataaggtaaacttcattaaaactttcaaaattataaggtatttgaatatctaaaataccgattatattttcatgattaaaatgttttaataattttaattctcttaaagttctaagacaaaataaagttctttcaaagggttgaattttctttattgcaactttctgctttgttggtttataaattgcagaacaaacaattccataggcaccttcaccaacaatttctttgatttgataataatcactaacattaaaagttacttgagtttgaggtaatggcattgtaattgtaaatgtgatttattatttattattaactatatataagggttatgtactatattttaaatgacattaacttgtcgtttaatcataaaataagataacagataaagattatattaaacgatcttaataccaatatatcatcaatttgatcattatcaacaatataaaatataaaataaccataataacgcgttaccagtataatacttaataataacaataaagaaataaatctattaatagatcactaagcttacgtaacacacacgtgaccactaagagggtttttattagaaagagaaaaaccctcactcaaatttaattttttcaatctgaaaaaaaaaatttgaatttttcactcgctgaatactggtgatagtgataatactgatattattgattattattgatgatgttttactacattttctttaactatttacataatatcttttatttcctcttccttttatcaactcgcatataatggttaacgttgcaatcaacaaaaagagaaagcttgtcgctgatggtgtcttttacgctgaattaaatgaattcttcactagagaattagctgaagaaggttatgcaggttgtgaagttaagattactccaaccaaaactgatgttattatcaaggcaactagaactaatgatgttttaggtgaaaaaggtagaagaatcagagaattaactatgttaattcaaaaaagatttggtttagctccacaatcaattgctttatatgctgaaagagttcaaaacagaggtttatcagcttcaactcaatgtgaatcattaaaattcaaattattaaatggtttagctgttagaagagctgcttatggtgttattagaaatgttatggaatctggtgcaaaaggtattgaagttgttatttcaggtaaatctaagggtgctagagcaagagcaattaaatttggtcaaggttttatgattcattctggtcaacctgttaatgatttcattgaagttgcaactagacatgttcttttaagacaaggtgtccttggtttaaaggttaaaattatgaaagatccagctcaaaacaaaaatggtccaaaatcattaccagattatgttaaggttcttgaaccaaaggaagataaaagaattgaagaaccagttgttgttatccttaaacaacaagctaaggttgaatcaactgaagcagctgaacaagttgaagcttaaattagttaataattttaataatcttacctatatatttttttaataaatcttatattataataaaaataaaattataaattaaattaaataataaacgatataaaaacttatacttattcttccattcttctcttttgttctctttcataatacatattaagtaaatcaattgctttatcaacagaatatttagtaccaactaatgtaatttccctttcattatcttcattattttcattctcaattgcaactgcacattgtgaaataattctaatttcttgaattcttgatcctcttttaccaattaaggctccaatatattcatttgggaaactaatctttttaataatttctttacctccaactcttgtattttcattattataattatgagatgaattgttatttcttctgttattattgttgctatttctattattataattaccattatgattataattattatgatcaattggtgaacatggaatataataagtaactgaatgattaccttgataatctcttaataaaaatttagaaattaatctaattgcattttgtaaatcatttttattattaccttgaatttcaactaatctctcatttgaattttcaaggaaatcctttgatgcaaccattttaatattaaatttttcttgaattgatttaattctattaccatttttaccaattaatgtaccaatttgagaatttggaattaataatcttaaaaataaattattttcatattcaattgatttataatttggtctattacttaaaggttttaatggtgaataatcataagaaattaatcttaatggatttgtacccttaaattcacaatctttaatagtttgaacatttgcatcagtaactgattgtgcaatatctgttaatgataatgaaacattatcaattttaccactaattgataaaactctatcaatacaaccgtcaataacttttgaaacacctgctttaatatcatatttatctctaatttgactaatattactaccttctttaccaataattgctcctgtttctcttcttgaaactaaaagtctataagtaattgtagattctgataattcatcattatcatcaaattcttcttcttcgtaattttcatgttggtcttcctcttcttttccattttctgcttcttcaccttcttctttgttattagaattttcattatcggaataagtttctaattgagatgatgatgaagtattttgaattgcatcattaatattgacattaattggttgattggatgtatttgaagtgatactattatcaaataatgattcagaagctgacatttttttcttgatgaatgatgattggtggttttggatgttaatttgaagttgaagtaaaaagtaaatgggacttaattgagccggagaattgtaaaaatagaaattggggggatgaaaattctaatttaaattaatacgatattgggtcagtgcaacttgtaattgtatgcttgaatataactataacaaactgtacttcaagagaaagagcaagtgatcaatcatcaataatattatcgccacctatgacacacacacaacaaaatatgaaatttcgctgagcattgaaaatttcaatacgtatactctttattacttctacaacgatctactgctattactattacaatggaacatcacgctgattatgcagagtttgactcttcactaaataggaaagatgctcttgaatctcttattatgtcgtatactgctcttgcagaatctcaatcaaattgggtagctaatttagctaattgtagttctcttctatatcattgttataataatgctggtgttaactgggcaggattttatgttgttgatgttgaaaatccagatttccttatattaggtccatttatgggtaaagttgcatgtcaatcaattaaaattggtaatggagtttgtggtactgcagcttcaactttgaaaactcaattagttccaaatgttgaagatttcccaggtcatattgcatgtgatggtatgacaaagagtgaaatcgttgttccaattgttcaaaataataaattaatcggtgttattgatttagattgtactgaattaaatggatttactgaagttgatcaaaagtatttagaagaattagctgttaagatagctgaaacatgtaaattctaatcataagtatattttacttaaagttttttctatacaatattttctaacaatacattgttagattcattttccctctctcttttcttctctttgtaaataaatacataaatgtcagataatataattgctaataatgaacctgcaatatttgaaattatatcataaatatcgaaaactctaaatggtgaaattaaatgttgtaaaaattcactaccaatacctccaattaatgtacatattataaaagttacatttctaactaaccatgtcattctagtatcgacaatccaatagaataacaaactaagtacaaaaaacattccaaaatgaattaatttgtcatttggaagtgaaatatctgcaaatcctaagtaaattgccaaaataacaaaaataccaaaacctataaaaaattaaaatgttagttcccgtccattttcttcataattaacaacacttacctattaatacattctttctgatacgtatcggtaccattactacctcaattacttactgtaaaccacctgaaaagagcttcaatgatccaaaactacatccacccacaacaaatctcctgacgtggtggctggtcaaaaataaatttgtagattcttacgtaatgggcatcatgaatattctgcaatgcactttacgagccatcacttctttatcagtggatagaggaaaggcctgatattaatttgcaagaccatgagttcaatatcgtgtggtatatgttttcggaaacacaataagatagataaagatgttgataatgtaccaaactcaattgatattgatgatgatccattttattgtttcccatgtgttaatttccgaatattgaagtatagattaaacattataaatttacttaatttaaatagaattgcaattcacgatattgatcaaatattgaaggagtcgatgagcagtacagaaaatatatcgaattttctaaaagattatgttaatcaagatataacttctactaagaagaaattccaagatacaaatgtacctgttgatgttgttgcaagattagcatatatgataattaatcaaaggataagtacagcagaaattaatatttctaatgctaataagttattagaactgaagaaacggaaaaataatgaactccgaatgaaaatagaacaattaagaaaattaaagaatgataagattaaaaatataaaaaacttagaaactcaaataagtaagtataaagataataaagaaagtacaaatcatataattaccaatagacaaaatgaaatgatattaaaggaacaaaatatgttattgtttgatttattagcattatgggatgttaaaataattgaacaatcaaaacttagtgtcttattcacaccaattataccaataactgagttatttacaaagaatttaaattttataagtcaaatgttaattaaaatatcacaattcattcaacagtttagtaatatagttaacataagaataccatttgaaattgaaacatttcgaaatgaattacttattggcgataaattttttaaaatgattagtgataatagtaaatcaatttatgatttatcagaaattggaattaatgcattgtttataagtataagtagattgattttgaacatttgtatcatttcgagaacattagatgaaactttcagaaatgaaattaaaagtatgcatgatttgataaatattgatcaattattattaaggttagttaatattacaaaggacaggatagaattcaataaatttatgaatttgaaaatcgataaattattgaatgaaaaatatgaacagcttgaaaaacaaaagaaattaatacaattaaaaacagatggaaaatggagatggaataattggttttcaagagataataatagccaagctatagatactcaatcaacaactaaacaattaaacagaaagaaatcagttaatagattttcaataaatactttagccaattacacaagaattgtatctaataccacatcaattccaaaaagtattcagataaccgaccatgaacatcaatgggatctactacaggtatccacattgagcacttctaacataccaatatcgaagacattcaccctactgctaccaacagtggaagagatagtgtttgtattactgagccgcgcaaaacacgtgaccagcacgtgacacatactgtcaaaatttagtagcgtgtcaatagtggaaatagtgaggaattctttaaagaagtggctgcttcatgattataatttatgatgagagagataagaattgttataatcttataaccttttaaaggtgtatttttataatatttaaaggtaattgagtcttctattactatccaaagatgctttctgataaagaattatttgaattaaataaaaaggcagttactgaaggttttaaagttaaaccaagattagattataatacagttggtggtgttaatggaccattagttattcttgaaaatgttaaatttccaacttataatgaaattgttgatttaacattaccagatggtacaactagagctggtcaagttttagaagttagaggtgataaagcagttgttcaagttttcgaaggtacatcaggtattgatgttaaaaagacaagagttgaatttactggttcaagtttaaaaatcccagtttctgaagatatgttaggtagagttttcgatggttcaggtagaccaattgataatggaccaagagttttcgctgatgattatcttgatattaatggtgcaccaattaatccatatgcaagaatttatccagaagaaatgatttcaacaggtgtttcagcaattgatacaatgaattcaattgcaagaggtcaaaaaattccaattttttcagcttcaggtttaccacataatgaaattgctgcacaaatttgtagacaagcaggtttagttagaccaacaaaggatgttcatgatggtcatgaagaaaatttctcaattgtctttgcagcaatgggtgttaatttagaaacttcaagatttttcaaacaagattttgaagaaaatggttcattagagagaacttcattattccttaatttagccaatgatccaacaattgaaagaattattacaccaagattagcattaacaactgcagaatatttagcatatcaaacagagagacatgttttaacaattttaacagatatgtcttcatatgcagatgcattaagagaagtttcagcagctagagaagaagttccaggtagaagaggttatccaggttatatgtatacagatttatcaacaatttatgaaagagctggtagagttgaaggtagaaatggttcaattacacaaattccaattttaacaatgccaaatgatgatattacacatccaattcctgatttaacaggttatattactgaaggtcaaatatcagttgatagacaattacataatagaggtatttatccaccaattaatgttttaccatcattatcaagattaatgaagagtgcaattggtgaaggtatgacaagaaaagatcatggtgatgtttcaaatcaattatatgcaaaatatgcaattggtagagatgcagctgcaatgaaagcagttgttggtgaggaagcattatcaactgaagataaattatcattagaatttttagaaaaatttgaaaaatcatttatttcacaaggtgcttatgagaatagaacaatttttgaatcattagatttagcttggtcattattaagaatttatccaaaggaattattaaatagaattagtccaaaaattatagctgaattttatgatcgtcaaagagataatgaagatgaagaagatgaagaagaggaagatcctgataagagtaatgataaataagcattttaaggttgtataaaaaagcaaataaataatagtaaagtaataataaaaaaaagtaagtgtatatctatgataaacggaatgaaaataatttttctcactgtatagtccggatacctaatgtttcgatgcatgtccagtcctttagtcaatgtcaattggattacttaatttaccaacagaaatattacaaaaggtatttaatcaagtacctaatgaattaaaattaacatgtcgaacatttattgtaatgtataataattattattttaatttatttattaaaaggtttggtattaaaacgattaaagaaattgaaaataatgaaaaacttattaaatcattgaaaaggtatattaaatcatttgattattggagaggtacaatacgtaagattatttgtaatcattatagactagaggatattaatggaattgaaagtgaatttattagagattcatggaaattaatttatggaattttcatgaataggagaattttccttgaatatgaagattatcaatttaattataattataacaataataatcaaaatttaaatattaataaatctattaaattaacaacgggattatataatttatcatgtggtataattataaaaaattttaatagtatgagttcaaccaagattacaattataaatgaaactaataataatgaaattattcatgaatttcaaccagcaacaaattttagtgaattagtaccacataacaaatttgtacttatggatatgggagattttgaaataagaaaaagaattttcgaagttgatgaaggtgaagatggagaggaaatttatgatccaatggttgatattagagtaattgttacagagaatggagaaatgttaaaatctgcatttataatatgttatttagatataaatgcatatcaattaaaggatataattattgataaggcgaatggtaaaatgagatgtaaatttgataaatattggattgcatggtggattgataatcagatacctaatcctgataatgttgttgataaattattgaaaaatgtttataaaaatgttgataaaggtgaagatggagttgaagatggaggtgaagatgaagatgaagatattgatgtagggtttagtgagaaattttattcatgtgttaatgaagaaggagagaagttacgtagggaatggaagtttaggaaccaaattgatcgtaggaaatttgaagagaatattagtgatgatgatgatgataaagttttattgactgaaccgataaagtggaaaatgagtacaattctcgaaatatgataaggttgtgtatatttcttttatgtagagacattaatacaatgactgaacaagaggtaagatcacgtacgattggacgtgcaataattgattttgataatgataatgaatatgagagattacatagacaaccatcaagattagatgaaagattaacaagggcacaaaaattagatattagagcacatcaaaggacatatcatggagcctatgtacgtacatgtattggatgtttatcatttagtttattagttatgaaattatttagtagagaatttatgtcaattggagttgtatttcaaatttattcaattattatatgtttaattggatattcaaggagtcataatattgatttatattttattaattttaaggataataattggtataaagattttatattagttgataatgaatcacataatgcaatttcaaatgaaggtcattatgatgttgataataaatattattttaaaacgagtggtaattatgttttatggttaacgattattacacttagttgttatataacattatttatattacttgcaattatgtaattatattatataaaatatctattcttctttaataccaccagtaccagcagtttcagctttttcaattgaagctttatcagttttaatatcaccaccagttaaatttgaaaggaaagaaggagcagccttgaaaggtctctttaaatcaccaacagctggggaattaaataaatgaattttaacaatatttgattctaaagcacctttaattggagtaattgattgcataactaaaggattagcaaatttcatataaagatgcataaaaccagtcattgctaaacctgtaaatatacctttaattgaagaatcaatttgttttaaatcataatctttaacagtagttgtaattaattttgattcagtttcaccagccattttatttggtgcatctaaatattttaaagttgttaaatcatttttctttaaaattgtaaatctaacatataaatatattaataaagttaatgattgaccaacaacgaatgctaatctaacataaaataaagtatcaggattttcaaaatctaatcttttagatacttgcataccaataagcattaatacaagatttgaaacagctggattcatggtgggtgatgttgattagaggaaagttataagaagaataagagaataagagattgaaataaaataaaataaaataaaagaacataaaagaacataaattcaagataagaaagtaatatacgtgtaatgttgaaaaatgtactactaactactgagataatgaaaaattacacagtgagataaactccacagttgattaatggacgttttcttagtgaatatttctttttcttttctttttcttttcattagggtggcaaattgaaattatagatagtaccgacgcatcgaccgcagtattattgtagacgcaccgacgcaaaagtattttctgcaatcgacgcaacgacgccaaacgcgtaatttttcgtctaatttttcttatttttcgcaatttgttgacattgtttgatatttgttttaattgttgacataattattaattatcattaattattgatgttttgattattgatattttcattaagtgattgtattttatttgccattggtcgtatactcatataggtaacatgagtaaacctatatctgataactcccccactacgaggtctaattctaggaagagattacatccttcaactcctattatattaaataacgcgataatgactaactttaaggagtttaatgatatgaataatatggataataataatgatgctgatgatattgatattgaaatgaaggaaaatattccaaaatctccttataacaataataataacaaattacatccttttaaatcacccaactatttatatcatcaatcaaataaaaaagttacacttcgtcgttcaactggtttacttaatttatcaattgaagcaagtccaaatactaaaagaattataaataaatcttctaaaaatgatgaaattttgaaaagttttaatgaattaacttttaaaaataatactaataataatagattatcttcaattaatgataataaaaataatataattaaacgacctagtgataatatgcaaaaaaaattagagaaaaaattagaaaaatataaagataaaataactaattatgcttcaacttcaattaaaaaaatatctccaattaaaaataatgataataataataataataataataataatgataccactactactactactaagaaagataaaaatagtataagaccttttacaactggttcaatacttaattcatctcaacaatcaaaacaaaaattacaaccttcatcaccagttttcaaatctgttaaacctttacaaactgcatttaattcaaatggtttacaaagtaaaactattcttaataatattaataataaaaataaatttaaacaaatgcctgataccccttgtaagagacaatctaaaactgttgatattttaaatgttaataataatattaataatattaataacaccattaataataataacatatcatcaattaaatcaaaatctgctccaaatccaatatctgatgaatcaatttcatttaataattcaaattttactaataatactaattttactcattttacttcaaatacttcaaatacttcaatttcaattcaaccttatcaaagtagttttaattcaaaaccttcacctgttaatacatcaaatttacaacaatgtttaatgaaattttcaaatgaatttgatgatttttcaaatatttcaatttttaataataatcataataatgatagtaatgatgaaatttggttagaaaattcaaaattaccaattattacaagttcaccatcaaaattaccaacaactccaaatgaaaaatttaaatttaatataaatttatcaagtatacagaaaagtagtaatttaaatactcctgatagttataaaagtgaagatactccaacaaaggatcatagaattatattaccaacttcaaatagtaatagtaatagttcttattggcaaagagctaattcaagaaatacttctgtttattcattacaaactaataatcaaattaataataatcaaaattatccagtttttgcacctccaaagaataataaattagattctcctcatacaccaattgattttgaaatgaatatgaatttattacatgataaagaaaaagaaaaagataaatttcatacttcaacaccttatagtaatctaattaaaaataatcaacttaatattacaaataatggtaataataataatcaagaaaatcatcttttaaataaatttggtaattgtacattaattggtaaaggagaattttcattagtttatgaagttttatttgaaaataataaatatgctgttaaaaaaagtaaagataaaatacctggtccaaagacaagattaaggaaacttgaagaagttgaaattttgaaaagtcttagaaataatattgataataataatgaaaatataataacgaatatggataataataataataataataacaataataataataataataatgaagatgttaatgatgatggtagatatcatgttttaacacttatatcagcttgggaaagtaataattatctttatataatgacagattattgtgaaaatggttcacttgaaaatttcctgttaaaagaatgtgaaatttctcatagaagaattgatgaatggagagtttggaaaattttacttgaaataatgcttggattaaaatggattcattcaaataatattttacatcttgatttaaaacctgcaaatatttttataacatttgatggtttattaaaaattggtgattttggtgttggtacaaaattacctgtaccaacatttttcgatagggaaggtgatagagaatatattgcacctgaaattatttcaagacatgaatattcatttgctgcagatattttcagtattggtttaataattgttgaagttgcagctaatgttatattacctgataatggtgcatcatggcaaaaactgcgttcaggtgatttatcagatgcaggtaaattaagttcaaatgatttagttggttcattaattaaaaataataataacaacagtaatgataatggtaatgaatttgagaaaaaatttcaaaattggactccttattggttatatgatggacaatttacacttgatagattagttaaatggatggttcatccaattccacatgagagaccatcagctgaagaagttttacaatcacgtgaatgtggaattgttcaattaagaagacaatcaggtgcaacaatttatgaaggtgattgtggccctcatgtttcagttaatgatttagaaattgaaaataatttactacagaatagatatagaattcaagatgttgtaccataggtaatgattaagtatataatgtaattaaaaagtgtataataagataaaataagataaaatcaaatgtaacaatattatgtaacaattaccggatgaatttttcactacattccaggcattacatcaaaattaccggtttttcatcactttcctttctttcctgtatactctttgtataaccaactaatgagtaaagaatcacagtaccgtcagtttgtcactacgctggttgatagtgataataaactaattcaaataacttcacaaccaccaccggattatattgctgttaagaggaaacgaaatagaacttcaatttcttgtctcacatgtaaacgtaggaaagttaaatgtgatcgtcaaagacctatatgtggtagttgtgttaaatatgggtataattcatgtatttatgattcagataatgtttttgaaagtgaaagtgatggtaatataagtagtgttggtatgaataataatggtagtacaagtagcgtgaatgataataataataataataataatagtactattagcaaaaacaatataaagtttataaataataaagaaaatcaaaggatagataagacattgataaatgatcaaataaatggaaatgaaactaataatgatcaagctaataagatttataattcaaggaaatgcacagaagaatttaaaaatttactgaaaactttagatacattaaaggaaactcatgttcaaaatgatgaaattgataatttaagacgtaaaattgaaaatttaagattttatcttgatgataattcaattgcaaattcaataattttgaaaaatttaccattaattggtaatcttacattagtaccaattttgaaaacaaattcaacaatttcaatgaattcatttaatttacaatttggtgcctcttcacttacaagttatgttgatattgatcattatatgggatatatttttcaaaaatctttaccgaaaattgaaaatgatatagaaatttggaagtctaaattttcagttgatatttatactgaagctttagaaatgataataattaatggtaattataatactaatcataattcaacattaaatgatgttaaacgttctaaatttagatttatttgttcattattagaaaaatattttattaattataatactttcattaatttattaaatagatcaacttcaatcatgttaatagctgtaccagtggtacctttaactttaataaatgaattggttaataaacattttttatctgctaataatggtcaattaattataactaatataaatgattccgatgattttagtgaaattttattgattttagcagttttaagatttggtttacctaaaagtgaaaatgttttgataactccaaatgaattagattatacaaatttacttaatacagaatcaattttaacagattataaaacagatttacttaattcatttcttaaaataattttaaatgaaactgatttatcacaaaaatataatattccaatgttaggtacattaattatacttttcatgatttcttatactcatagatttaattttaaatcaggtaatacaggtattagtttaaattatggtataattgcaatttatatggcagttaatttaggtatttattcaaaatctggtatttctgaaaatttacttcaagaaaattcaaataataattatcataaatttcttaaaactgatgattatcataatatttggaatttagttatgtttattgatacttttacatcatttaattcaggtataccacaattaattagttcaaatatggaaaatatttatttaacaaaatttttagattcaaattgtgcagatatttgtcgatattatcgtaaagcatttaaattagcaaataatgggaatttttcaaataatgaaaaagtttcaatttttaaatatgaaagatttgttattgaatttgaatcatttattgttaataaaattataccaacaagtatttgtcttacaaataatgatttagttggtgttgcaacttcaattagatcattaaatttattattattcttatattacaatagttatttttcaatcgttaagacaattgaaaattttaaatcaacaaataatcctcaaaataatataaaatattcattatatatggaacaatttaatgaattagagaaaagattattcaatagatgtattagattatcaattatttcattaattaatttaaataatatgctcgtttcaacattctcagaaaaagatggatcattttatgaaaaatattcatttgatcttattcaaatttttactaggattgtttatacattaacaagttgtgtttgtaaaatgatttcagttaataaatctaaacttgctggcaatttagattccgagaataatgttgaaaatattgaaaattttaattatttatttgatatttcacgtaaacaatcagaagatttatcaagatattttattatattacaatcacaaaatttacatttaaatgaaaatttttcacctgatataatacaaatttttaacaaagttaataaattatcaaattatccaagtgcaattattaaattacttattggattcttctttaatacatcacaatcattaatttcacaaaattttatttattatgcattatacaaatattttgttatggcagttaatgaatttcaagatatgaatgttaatttagaagactttgatattgatacttttatgaaacattactctcatgttgattgtacctggtttatcaacaaatgattatcatcttatcaaaaggaatattctttatctaatcttatctcggaatttaaaatccgagaaaataaaaggaaaaactttggaagttcattttttatttctataaattctttaaataattccccagataaaatactttgataaaataacatttagacaaccaattgattacaaatgttgggtgataaatttgtgtttgtggctatttcaacaatacttgcattctcatattacatactaccacaaaaaaatgaacattatccaacgtgtccaacagtagaaatttatagaccattgaattatagtgagaataaagatattcttgataagattatcaatgatgaaacttttagaaattcatcactttataaaatgcaacaggcaattagaattaatacaactagttttaatgatgatttaccattagatgttggtaataatttagataaatttgaacattttacaaaatttcatgattttttgaaagatgaatttaagcttgtttatgaaaatttacaattaaatatggttaatcattttggattagtttatatttgggaaggttcaaatacttccttgaaaccattattattaatggcacatcaagacacttcaccaattaatttgaaaacattaaatcaatggattcatgaaccattctctggtgattatgatggtaaatatttatatggtagaggttcaggtgattgtaaaaatttattaattggacatttagaggcaattgaggaattaattaaaattggatttaaaccaagaagaacaattattttatcatatggatttgatgaagaaatttcaggttttagaaatgaaaatccaaaatttattgaaaatatttatggaccaaattcaatgtatgcaattgttgatgaaggtggagtttcattaatgaatgttggtgaaacacaattagcagttgttggtactgctgagaaaggttatttagatttttcaatttcaattgaaaagcaaggtggtcattcatcaattgttgataaacgtacagcaattggtattatgggacaattaattgttgaaattgataataatgaaatgccaacttattttattgataaaaatccaacattttatcaatatgtttgtcttgcagagaattcaattgatattgatactaaattaaaaaatgatattcttaattcacaaattgatcaaaatgcaaatgaaaatgtaagaaactttattaataaggataaatatactgcatatgcaattaaaacatcacaagcaattgatattattaatggtggtgaaaaaattaatgcattaccagaatatgttgaattaatgatcaattcaagagttgcagttgaggaaaatattacaattgcatataataaatttgttaaagatacaacaaatatagctgaaagatacaatttaggattaaatgttcaaatggcatatagtgaggaaataattgaagttattcctgcaactgaaatgggtaaattaactattaaacctataacaatgttagaaccatcaccaataacaccaattggtgataaacactgggaaatatttgcaggttctattaaacatctatatgaagaacttgcatatcccgatagtaaagttgttgttacaccaggtttaggtacaggtaatactgatactaaacattattggaatttaagtgatcatatttatagatatagaccgggagttttacctagtgttaatgctaattcacatggtgttaatgaatacattgaatttgattcacatttacaaattattgcatttacatttgaatacatccaaagtgtcgatgctcttgatgactgattggtaattttgttgtctaaaacaatacgtttgtgtatgtattttatgtagatttataatataacagttgaatatttgaagatatttgctatcatggatgttactgccgtttacaatgcggaccaccagataaagtccttttgatagttattattctacaaatcattaggtaaaccactctagtgaaaagacataacagagtgatcatgcacccttgtggtatacgtaatagtcaccgaagacaaaaaaagaagaagcccgctgaaaagagaacatcataattgttaaacattaatttgataaattcttttgttatgtaagtgatcagctatttaattactaaaggcaaatttatattttattttaatgtttcattagggtttatatagtttttatttataatctacaaccccctgttcttctttgatgtaatttatttggtttatttgttatatacgtataccatatgaattaatttgagtcatgagtaaaattaggaaacttggtcgcccttcattagtttgctcaaactgtaaacgaaggaaaattaaatgtgatagaaatcaaccatgtattcaatgtgttagatctgatataggaataacatgttcatatgatcattgtgatatgaaacctactggatttggtagttcaaatgatagtaatattgactcaacttctgaaactgattcaaattatacaagattaaacagtgaattatttaattatccatcattagaatttaagaaaccatcgtttgttagagaagaaaataatataaaatatgaacctccattatcattagaggcgatagttaataataataaacattttgttaaatttaggtcacttatgccatttttatttaatgttaaagaaaatgaaatttataaagaatcacaaacatcaaattctaaacttgaattaaaacttttagctgatacttatacaattaatcaaataaatgaactaataaatactttatttatgccaaatattgaagcaattaaggaaagaattgattattttggtaaagaaatgatacccggtacatcaatggcatttataccaatgaagacaccattggagatatttgataaatgtattgcaccacacccatttgaggtaaataattatatttgtaaagaattaaatgatgaaactgattatgcattatttgcaataattttcataattgttaaaatggtttcatttacatctgaatttgatagatcaattaatttcaaatatccattaaatttatcaatttcacaattaaatgattcaagtttaaaatttttatcatttagtaattataaggtgaaaccaacatttaattcattattagcatttttattatgtagaatgaattattttatttcagattcaatttcagaacattcaaatgctgaatcatttttcaatataactttagaaatatgttataaactaggtattcatataagatgtgatcatattgaaggttatgaagaagatcaagttagaagagtttggaatgcacttcaatttcttgattgtatttcagcatttcatgtaggtcaaccattaaaaattgattatagatatgcagttccaaggttatttggattttgggaacctattatactatatttccgtaaaatagttttaagtataaattcagttcaaccaattactttaaatgaaatcattgatttaactcaagatgcaattaaattattttcagtttttaaatcttttgatactttattaaatgaaaatgcagttaaatttttttttccaattattataaaatgtgattttctaatatgttatgaaactttactattaatattaagattatcaattgatgatatctctaaaataccagttaagatagatgatagagatttaagattaattgaagatttaaaattgaaatgtgaatgtcaattattttatggtatgattttaagtacaagattaataaaagatatttcaacaggtaatttttccaaacataatggtaaattattaattttaatgaaactaatttttggtagatatttattgctatcaaataatataatattttcatatttatcagttttcgataaagctaaacaatcaaataaaccaatttccacacttaaatataatgatgtatcaattgctgaattagagaaatatatttgtaaagaactggataatattacatttgaagattttgaatataaaaagatgagattattaatgggatcaattcctaaattgaatgaatatttaattgatttttataaaacaatttcagagaattgtccaatgatacttgatgggtactttaatgtttatttcaaatttcttttatttgtttgtaggttacttcaagtcacatatgaatatacagataatcaaacatcaattgatacgaattttcaatttaaattagatgattggaaaatagttattgataaaacaactaattactttattaatagtggtgataataatgaagataataatatgtcaagtaattctaccagtaatagcaataccaatgtcaatgaatctcttcaatggggattaccaaccaatgaagttggtacaaatcttaatgctgatgatttaaagggtattgatgatatgttttttggacttgaaggaaattctggaatgttaaattcaccaattaatgggaataataagaatggagaacctaaattaaatgaatctgaagctctaataactggatcaagtaaacattttaatacatctgattgggcattccttgtaagtaatgaaattagagacaaattaggatatgctgaagataatgctaaggaaagcacagaatttgatgaaattttccaaatgtttattgaataagtgatgaataagagaaatgatgaaatgaataaaaactgtacataaatttatataacacattcctgtatataaactaaataacaaataataccctaataataataatacttttgctaccaattgtacagtaagaaagaaatagaaatagaatgatccaaagctgacataatacaatcacgtgatagtcacgtgacgaatgaatttcaaaaattttctctctttgaccatagtatgacgttattgcacagttgtggaagctgggaattttttaattaattttattagccatgtattattattgtattgtctattcggaggtttatacttttatgatcatcataatcatttgattttaatcatttaaataacagcaatttactctgcttttattagagattattatattttttatatcctccaactattctttatacttcaactattattcacactattattttaatcattaattcaaatgcaaaaggaagaagttgtcatgtccatggggggcaaggacaacaacgataatatcgtggtgaaggaaaatttacagtccccaagtgttttagcaatatcaaatttaagatgtccatctccacctccaatattacaacataatagaagtattacctttgttgataaagatatttcacatattgatttatcaaaagaaaaagaaaaagaaaaagaaaaagaaaaagagaaagagaaagaaaaggaaaaggaaattggtagtgatactaataatggtaatgagaatggaatcatgagtttaaatggaagtggtgtatcaagtgatggtgaaattaatagtaaattgaatgaaaatccaattgtttcaacatcaattaatcatgataatgatgaaaatccttcaattaataaaattttagaacctgtaatgcattatgaaaatactgctgctgctcatgctttaactgctgcaatggcagctcaaattgcaagggataaattagagaatggtaatatttcaaaattaaaatcatcattagaaaaattaaatattgagaataataataataataataataataataataataataataataataataataataataataataataataataataataataataataataataataataataataataataataataataataataataataataataataataataataataataataataataataataataataataataataataataataataataataataataataataataataataataataataataataataataataataataataataataataataataataataatagtataaataatcatcaaagagttagttcaatgcatgcacatttttattttgatgatactataaaacatcctgcttcaactatgagatcaagaagtggttcaacatctcgtgatagtgaacaaattttaaaatcaccattcgataataataatactaatccgaacaacccaaataataatcaagcaatttttgttcaagccggtgcatctaatttatcaaatgtttcaactacttccattttatcaacacatagtccaataattaataataatatactggaaagtagatctaattcaaataatattcataatataaatataaacacaaatacaactactaataacactactaatactaatacagttaatacaccagtatcatcatcaatatataatccaaatagtggaggattaacaccattaagtgtagctgctagattacaacacgatgatggtaaattacatatattatttggagcatgtggttcagtttcaatcaaaaagactaaattaattattaataaattagaagaaatttataaagataaagttaatattcaattaattttaacaaaatctgctgaaaattttattgcaaagggagaatttgcatcaaatataaatatttggagagatagagatgaatggagtacatggaattcaagatctgataatgttttacatattgaattacgtaaatgggcagatattttaattgttgcaccattaagtgcaaatacattaagtaaaattgcattaggattatgtgataatttattaactaatgtaattagagcttggaatagtcaatatccaattttattagcacctgcaatggtttcatttgcttatacatcagttataactaaaagacatgttaaagtaattaaagaaaatatgaaatggattgaaattttaaaaccaactgaaaaagttatgagtagttatggtgaaattggtatgggtggtatgatggattggaatgaagttgttgttatgattgttaataaattaggtggatacccagaagacgaagaggaggaagatgaagatgatgaagatgacgataataatgataacaatgataataacgatgatgacgatgatgacgatgatgatgacgatgatgatgatgacgatgatgacgatgaagatgacaatgatgatgaagatgacgatgatgaagttaaagaagatactattagatcatccaccggaatagaaccacctgcatcacagactatacaattaaatagaaatacgaatacaattccgaatgtcgaaccagtaccgaaacaagaaatagagagtgatgatcaagaaggagagaatattgaagagagatttgaagatgcattagaagatccacataccaccccattatctgtaaactagctacatgtagaataattgtagtataaaaattaaatacatacttgataagatattaataagatttataaagaactatgaaactgctcagtattacttaagtggattattcaaccaaatttgaaaaaaccgccattttcaacaaccgatggcttatttttctgacaacacccgttgtttcatccgatggtttcatatgctcaactttgccctctccatatctcaattgtccattagatgcatttgagaccttattataagggacattctaaatggtctcagagttcagatgttactgatcttgttcaattacttttattagttgctaatacacctgcatctaaaaaaatcttacaaaggctcaacattagattgttgttgttaattttacgtggaatttcaaaagatgaagagaatgatacattttatgaatttgatgtattggatgaaaagataaagaatttatggttggatgtacttgatgtgctcaacaatttcccatgtgttaaacttattgatgcatattctccatatcatttaggttccagtggattaaataaatcaaatagtgatttacaaattttacatggtaataatggatctattggtaattatgataataacaatggtaatagtacacctataaactataatcttaataataatggtaatggtaatggtaacggtaatcataataataggaaacaaatctccaaaaatggattctttaatgaaaatactgtcgaagcttctacttggtatgacttagcaattgattcagaagattatgatttcttactggaatatttatttgatatagaggatgaaaaatatggtataattttcccacttattgaagttggaactaaaaaattcaataaaatatatgaagttttaaatgatttttgtcatcatattaaaatatccaatgatcatttatcagttatcaaagattccgagaaatttatgaataaattgagtgttttaacattggagaattatgaatattctgaagttgcagagaaattatcttatcaaacattgaacgttttaggtaatgaagttgatttattcactatttcagcaattttagaatttaataaagatttagagacaatatatttcaagggaagactgagagattatatacctgcaaatataaatcctaaaattaaagtatattacgatttagttgtctttgatacaattgatagagttcagatacaaaaattaggaaatatggaaagaataaataaattatatttaaattttacactggaaactgatatctccttagaatggttgaaattatgccagaatttaaaatttattcattttggtcttaatttaaagtcttcatcaagtacacaaacttttacactccttaacaaattccccaatcttgaagaactatacattaaatattgtaatttaagattaagttcaaagaatcaaaaagtatctgattataatctttttccaaaacttaaatatttaacgctagcctattgtcaaacggaatcaactttcttacacacaatttcaaattctccattaattgaattatatttggataattgtaagatcaaatataattcatttgtcaaactaccaaaatatttaaaacttttctcagtatcaactaaagacaaagaagagtttaatgatttaatattcttatcacataaggcaagatcatcatctggtataccgagcctcaaatgtattttactaaattttgatggaaaattggtaaatcttacatctccatcaatgaatgatgtatattttgctaataataaacagaaggataaacttgaacttaatttaacatataataaaccatcatcacgtcactcatcattcacttttatggtatatccaacatctgaaaacactgatttttcatttttaaaaaatatagcaaacaagtaccatgttaaaaaacttattattgaattgtacacatattccaaagaatttttcgaagcaattaacatagacaatattaaaaatgtcaaagtttataaatataatatttatgcaatgtacaactacatgaatgaattacttgcaaagccaagtttaactccaaaagaacagtgtttttttcttccaggacattatagacaaaaggagaaacctgaaacagactctaaaaaagataaactagctaattcattgataacattactgctgccaagagaagcatcaacatcaaagaacaatcagtcaaatcatcatactaaaaatggtagagtttctaaagaaacttatcaatatccaaatgattcacgtgtatgtgatatatgtttcaaaagtttcactagagctgcttcattgacaagacatttactgaatcatcataatattgttaaggataacacatgtcatttatgtggtcgtactttcaaaagatcggatcaccttaagacacatttccgtagttgttcaaagaagaattgattgttttacaatttagaaacgtttttgagttattaactcgtgtataatatatatcttgactaaaactataaaccatataagtatcaaaaacatgtacatttagtctaactgtgaaatcggttacatgcgaattttatgattgatgagaatcattatttaataagcttcttttctctttatctttcctttccacccttgttccttcttcttgttttcttcccttgttagaatatagttggtggagataacagtttatgaatatttcatttataaacaaatctttggcaaattatcaacttcttaagaaatcaattaacttaataaataaaagaaaaatgcacgttaaatatttgcctatgagatggaaatgtggcgataattactgctacattttaagtgatgataaaagtaataaatcatggattatagatcctgcatttcctaatgatattgaagattatttgacaaatgaaaataaaactgatattacagcaattgttaacactcatcatcataatgaccattccggaggtaacagatttcttaactccaaattatttaataacttacctgttattgctggtaaagattctccatgtgtttcatatactccatcagatggtgaagtaattcaattgggtaataatgttgaaattactgcaattcataccccttgtcatacacaagattcaatctgttattacgcagttgataaagaaactggacaaaaatgtgttttcactggtgatacattatttacatctggttgtggtagattctttgaaggtaatggtaaagagatgatggatagtttatttaaattaatgaaattacctgatgatacaattgtttatccgggacatgaatatacagctggtaatgtcaaattttctacttctgtgttgggtaaagataacaaagcattgaatgatttagataagttttgtaaatcacacgagtttactactggtgagtttacaatctctgatgaaaagaaatttaatcctttcatgagattaaatgatccagaagttttaaaagctacaggtttagaagatcccgttcaagttatggataaactcagaattatgaaaaatcaattttaaaaagtatactacacacaacttgttaatcattattattctattaaacacttttctcctatatagtttctataatttcaaataaattttgaataccagagactaattcttcatcatagccttcattaggagtatattttgcatgtgcaaagtctataaatttaagacaacttaatggtacatcttcatccaattctttgtcgtctgtatgttcggtttcttcatctccgtcatcatcgttgattgttggagttgatataattggatcttcgtaatttttagcctcccatctggataaatcattttcaaatacgaaaaacaatgatccggagataacacgtatttcttcttcaagtgaacaattgtataacatttgcaatcgtacatggaaattttcaatcagtctatcttggacatgatttggtaagttattatatctgaagaatattttcaatccttcactgacagtatctttagttaatttacgtccaaaatatttatcaaacgtaatgtaatcttttttaaaagtagttgaagatacatctttcattttcaaacctggtaaatcttcaggtaattttccatcaaatgaatcttttataaccattcctgcaattctaaactttaatgatccacttgtagtactttgtgaaacttttttcattctttcaactttacttgcatttgctgatgagtcatacagaattgaacctaatttaatatctaatatacttggttgtgaataaccataaagacaatttttcaatatgagatattgtttatgatcaccttcaatttcaagtgtatcagttgctttatttaatgttttttcatcaattgcaccattactttgctgaattaaatcatttgaaagtccagggtataatacaccaacatattctggcatccaatcagataatgaatctccatatggtacgtcatcattaattttcattcttttattttgagtttgattgtagaattcaatttcttgaggttgtgatggtttaatgaataaagaaccatctactgtttgtaatggaccttcatgacctgcagcttgatgtgataacggtattagagtcatattgatgaaagatttgatgttcaaagagaaaaaaagtgtaaaaatgaaatcatcatgaaatttattaacgttttaatgagattcatgtaagagtatacaaagtgatgaacaaacgttaaatgaaattagtaaaattagtaaaagtatctatgaagttataaaagtaaaagtgtatacatagtataatgatcaatgtttctttcttgattggttagcaaatctacctttactaactttaacatgaacgggtttaacatcagcaccggtaaagaatggtgaaatacaattatcagcagatccaccaccaataaaatcttctaatgctttttcattttgacgttgttgccatttagcatctttaattgcttgttgatattcacgttgatcttcactgaaaaatccattttctaatttatcattaccacgatgttggaaacctttattaccatatcttttagttgtttttttagataatggagatgcaactgaataaacattacctcttgtacgccatacaaaattagattttaaatgtggtgtaattttaccagtatctgaattaattgaaacaggaatacgacgtaatgttgcaccaccacaatttggacaaaaatgttttggagttgtatcctttggaatgggtattaatgaaaaacatgcatgacaacgtaacatatagtttctaactcttttaatttgcaatcctgacattgtattcattaaattcattcctaattgtaatgaaacattttgaactgcaaaatctccactggctaatgcacatttaatttttgtttgtgttgttgtttccttttcaattttatcagtaccttcttctcttgcaataattgtaacaatattatctggtgtaatccattcacctgcatcatcatcgtcatcatattctgcatccaagttttcttctttgacttcttcttttgattcttcagtggtttcttcttctttgacatcttccttaacttcttcctttatttcttccttgacaacttcttttggttgtgaagcagcaattttactcttaccctttttctttggtttgacaatttcaaatccatcgtcatcaacctttctatcgtcttcttcttcaactttagaacttggatcttcacccttttctgcgagtcttttcaatctattttcttctctaattcttttttcttcagctaatcttatttcatcctctggtctaatttcacctggaaactttctaaatctggaaacaccaccatttgcttcaatatcaagttcgtaagctaatgcaataatatgtaaatcattttgtgataaaactgttgaatcaccagttaatttagcaaaatgaacaacagcttcaatcgattccttctttggatgtctaacttgtaatttatcaccccaaataataagttgatttctaactgattcatccttcaattcattatagacacctggagttgtgtaaaaattatctgcaaattgttgtaattgtgtggcaggttgagtaatgattggacctgcatccaaaactaaagtttcaacattatgtttagtagcttcaagtttatctgacatattttactctatatgctgtgtatactactataataaacgtatattcaacgatataatcattaacaaagttgtagttgaagcattaaaatttcattttaaaaatttttttttcaaatgttgatacacagcctcgaagattggaaaacttactttttggttactttaatgatcatcacggtgtttattaacaaagattgtagacaaatataatgggtgttgcagaatctgtacaggaaatagagaagttaattgatgccagtaagctaggtgatgctgatgggattgctgataaattattggagtctaacccatcgtgtaaaattttaattttaaaatcacaaattttattacaaagtggtaaacttgatgagtgtcaaaattatgcaaataaagcattaaagattgcaattgacgaaggtaaaaggttaagaattgcagaatcttgtaaaattatatcaatggcttatttccagggtaaagattatgaaaattcattaaaatttataacaattgcatcaaaatatattgattcaaatgataatgaaattactacattaaaatctgtaattgaattaaaatttaaaaaatctaagaaaataaatgatgatgaattagctaatgtggaatcagagattgaaaaactatcattagaatcattaatctcatctgataaaaaggttgaaacaacaactaccaaagctgaggtaaaacctgaatcaacggaaacgaataatagtattatcaccactgaaaaaatcagacatgattggtttgatacgggtaaatctatagaattatcgatttatgtgaagaaaataaataatgaaactgttaaaataacatttaattcaacaagtattgaggcatcattcaaagataacgacaatcaatcatacaatttcaccattcctcaattatactctacaatttccacaactgaatcaagtttcaaagtatacggtactaaacttgaaattatattaattaaagataaccaatgtcattggaataaattagaaaatgataatgataatcaaaaagaggaattattatcaatacctaaggaagaaagtaatccatcattatcatatccatcatcatctaagaatcataaagactggtcaaagtttggaaatgatgatgatgatgaggatgatcaagatcaagatcctgaagcatttttcaggaaattatattcaggtgcagatgaagatgcaagacgtgcaatgatgaaaagttttatggagagtaatggtaccagtttaagtactgattggaaagatgttggttcacgagaggttaaaccttataaagatggtgatgatgggaaatagatgaataaattaagtaaaattaaaattgattatttgcttattatttattgtacactttatataatttattaaatatgatatgactttatttaaaaagtatctgaatctaaactcagattataagatgcatgattatcattggtttctaaacttttagaaatggttgtaaaagataaaagttcatttttaatgaaattattcttttgtttcaactcatttaccatattcattttcattttcatattattattattgttattgctagtattattattatgattttctttatcatcttcattatctgaataatcaagtattgaatcgcttaactcctccacaggaattaaattgtttgaattgtttaaattattttgagttttcaataagttaacttttttattagatctattagttgatgtagaatctttattggaagaaaaaatagtaaattgattatgatcattatcattattattactaaatgtgtttgaaatcatactcattggtgatcgtttaataacattaggtgattttcttaatttatttaatgatctagtaattgaattagttttctctactgatgaaaaatttggtgatttaattggtgcaggggtatcattattgttattagtgttattattagcattaattttagttgaagcatttaaatctagggtaaaattagaacttttgacaggagatctaccacgtaaaattattggttcatttgaaagtgaatctgatgataatggtaatcttttagaactattagttgataataatttattacgttttgaaatacttggggtattaattgaatttgttcttgaaggtgttggatttctagataggaaaggatttgacatttgtgttggatctcttcttctaattattgatctcgatggagttactaaatttttactatatttattagttgaagataaattattatttctaatattaggggatattgttggtgatttaaaggatgatctaatatttctctttttatgtaagaaagaattttcaatttcttcaattttatttaaatacaattcaccatttaatttgaaaactctaccactatcagtttcaaattgattaatttgaattctaatttcattcaataatttaggtaattccttttgaagtctatttcttgtaatttcttcttgttttaaaattttaaaagaatttcttttcaataaacgagatggatcttttgatgattcatcaagttctctcttttgtatcattaaatcatctaatttagcaatcatatttaataaaggttttaaattttcactttcatttcttaatctattcaattcatttgtatgagaattaagtaaatcttcattaaaataatcttcattatcaatataataatctttaaaatttaatttactttcatcatcatacattaaaatatcccaaaatcctttaattttttcccttgataaattaataaattttttaatatttgctaatttttcaatttctaattcatttaataaaattttaaaattttcaagtgattttaatttaatatttttattttttttaaggaaactttgaatttcatttgaatttggtcttaaaattgaccataattgttcaactttaattaaataatcatttaataaaagttctctttcatttttaatattttgtaattcattgaaaatagaattatattcatcaaatatttgatcttttataccaattttagataatattaaatcattttgatcaatatatgaaggtaattttaaaaaatcttgatctgaaggtataaataattcattatttaaatttataacacttataattaaaattttcaaatcctctattcgttgatttatataatcttttaatgaaattatctttaaatccaatttctctattagatcgggattaattttattaaaatttgtttgtaatataagtttaatatcaattgcttcattaatttcattaaacagagaaatatctgattttgttggtaaattatttaagaatgaaatatcaataatttgattatttttatcatcaattaattcatataatgaataaaataattttaattgtttattaaaagataataattgttgagataatattggtattaatctaattaaatttttttcaacatctttatttaattcaaacattgataaatcttcattacaataattttctaaatttttaaaagaatttgatttataatctaaaattaattttcttatagttggagttaaaacagattcattaattgattcaattggagaaaattttgaagttattgaaaatattttagttatagtttctaaagatttaataaaatcatttgttaatttttctttatcttttaataaatcatgtaatatattatcacaagtatttaatagagatgtattccaattattaagttttttatctttattacctaaaagagaagctaaattttgaatttcatttaattttttaattatcatatcaattggcagagcaaatggtaaattattttccacaaatcgtataggagatttttcctttggtgatattatttgacttgaggtattgatattagtactagtattattactagtatcatcatttaatttatttgataatttatttgaatttatagcagaagatattatatcaactaattgatcttttgaaagatcagtccaaccctctttgaggtgcattatatgattcagtgctgtatatgcaaatagaaagccttaaaagatcttaatacaatcaatacaataatctttaaatgaaaaacttctactatcaaaaagttatctactattatcattattattatttacatttgattcaatgtcaaacacgaatatgaggcacatcgcggtgtttaccttttgcacttttgggaagtgttacgtaatgcagtcacgtgattgtgattatgtaatattggtcacgtgatttatattacgtaatggttgattatgtaataattttaaaaatatcattacataatccattctatagtattacataatcccaacattccacattacgtaataatgaaaacggaatttattacctcatagagtcaaatgatcctcttcctgtacaggaatttgttcaaatatacagttattagtaatattataatgatagtaatattactactattactatcttattattagtataaatacacacgtaatgtagtataatatagtatagtatactcaacttacttatctttataatatctataatacccatcaataatcaaaagaaaagacttgaaaaggtatacatataactttcttacaggaaaaacttttaattcggggtctgtcatcatcattactaaaaaaaatatttttcgtgacaaattctaaataattttgccatctaatttttcttatcttttatacctaacccttttctttctttcctagttcccattaaatacattaattaactaccttttaacaatgtcaaatatattattattaattcatccaactttagtaactcaacctgaacttatatctaatcaaaaaattcaatttaataatgatttccaaaatccaattattaatcaatacgtcattgatagagttgcatcaaatcaacaacctttattacatgaaaattatgatttaatttattatttagctccaaatgaggctattgataatcaatttaataaaaatttattaaatatattatttaattcattaaaggaaaatggtaaatttactggtttaataccttttaattctgaaattttagcaattcaatctggttttttaatttcaaatgataataaatcttggattaaaccagttaattcaatttcaaataatagtactgttttattaaatagaaaatcaaatactaatactacccctaatacatcttcaattttaccttcatttaaaagattatcaactaattctccaccttcattaactgattcttcaatacaatcagataatgaacctgataaaattttaaatgatgatgaaaaaaaaatgaaattatcatattttaatacaaatgataatgatgatgataatgaaattattgatgatgatgatttattaattgataatatatcatcatcaaatttaaaaccaattgttgattgtagtataacaggtacaaaaagaagaaaagcttgtaaagattgtacttgtggtttaaaggaaattgaagaagctgaagaattaaaacaaaaaaatttacaaaattcaattttaagtaaaatggttcaatctgcaacaagggaagctgaagaaattgaacaaaggataagagaaagagagttaaaagaaaaagagaaagtatcttcatcaaatgtaaagaaaacaattgttagatttacagctgatgatatgactgaaattgattttacaattgaaggtaaaactggtggttgtaattcatgttcacttggtgatgcatttagatgtgattcatgtccatttttaggtttacctgcctttaaacctggtcaaatggtcacaattgatacttttggtgaagatatctaattaatttattcatcataactataatcacaattataattataatttccattatatttctattcattatattcattaaacaggtatacattaacattttttaaaaaaaaataccccccataaaaaaaagaagtcacttataatatataattaataacttttctataaataacataacttaataatcataacatacattaaatatctccattacttttacatttaagtaatgtttcgtctaataatttaataaaattttcaggtgataaatcttttgataaataatttgtatcaaatttataagattcattattttcattaagtttatcaccaattttcaactgtttaatttcatcaattgataaattttcaacttgttttaataaaatatttgggaatttccatctatatttattacaatatttagaaatttcataccattgtaattgatttgaaataattaaattatttgtaatataatcataaattttctttgcatcttcaatcatatcagatttaattgttgaatcaattaaattaagataaatttttttatctaaataaatttcatgatttattaaaacattaattaatttaattgcaatttcaatattaaattttaaattatttgtatcaataaaataatttataatattatttaattgtttaatatggaaatgattatttctaattttagaataatctaatgaatttataattaaatattcataaaattttataatataatttgatgtgaaaattggtttaaataatttatcaatatctttatgaaatgtataatgaacaaaaactgataatatagaactatcatgattatttatactaaatggatgtaatttataatcattaccttttaataaatatttaatttcactttgttgaaatggataaactttattaaaataatctttaaaacatttcttaatttgtttcctagtataacatttctctggtatatatttcccatataataatgataatgtttccatataggggtaagtattatgcattattaaatcatcacgtatattaacatttggtaaatcatttatatgtaaaatttttaaattatcatttaaatgcattctttcattattattgatactttccctatatttatcatcagttgttaataaattaagttcctctaataatggaattgatttggggaataattttataaaatatgcaagaaaaattgaatatgatacaccttgttctttagataatattgataaaaaagttgtattaattgaaagtaattgagtattagtaatagttattgattttaatttacaatattttaaatacttgtaaagaattaataaataatattctaattttttttcatttgatattttcgtacatttagtaagttctctaagataaatatgaatattatttgaattaagtatttcctcaattgaaggttttaaatgagtaaaatttttaaattttgatagtttaattttatatttaataagttgattgttaattgtttcattatttatggataatttttccattaattctataaatttatatgcattattatattttttatgttgtattaatgtatcaattgtaagtattcgaagtgtatcattatatctataggtgaatatatcattgattatagtttcatttttttcatttggattaagaattccacaattcttaattaaatcaattccaagaattttatgatttgttatatttgaaatatttttcaataatttaccaataccttttatttcaattaaattaaaattaatttccttttctattaataatttgaaaaattcaatattttgataattatttaattttaaatcatttatatcaataatatctaagttttgaaaaagtaaattaaatttatcaataactaaatcattttgtgatttattattgatattttgataaatttctcttaattgagatcttaatttaattatatttgataattgatcttgaatttcaactttattataattatcgggacatgattttaatgttataatttcagttattgaattattatttcgtaaatgtgaatttgttgagaataatcgtattttcaaataagtagaatacggtatgggtgataatttaattatccctaatttattgaaacgtaatatcattagttaaaaatataacgggtaagtatataaacccggattagcttatctgaaaagaaattaattatcaaattcagattcagtgactgaaaaatcactaaatttttggtgaaattatctgaaaaattgaagactttattttcatgttaggtaccttctatttcggaaatttcattgatattggaaaatttcaaatcttcggaaaattaaaaaattaacgtttacgacgcaccgtcgcgacacaagtattgttgtgatagttatgattacataatctttttattttcaaattattattattataatctccgggaacaatttgaaagaaagaagaaaaaaaaagtgaaaaaattcccgctcggaaaccgaatatactaactgttattataaactccttttctattattggttattgtaagaatcatctttctcctctatttagtattttgtattctataataaggtaccatagagtagataatcttatagtcactattgctattactaccattcactctctacacagtgaaataaaacaaaaagtaatccaaaacaagacacaccctactgaaaaagaaaaccttttccgtgtcaggtccgaattccgggtcccccttacgtaattcccacccccataatactaatccccgttggtccttttactaaaagcacacactcagttaacgctgccctctctaaaattatcttcattgagttatattccagttcaagtacagttaatgcggtgttttatattatttttccttttcctgtgatttcatttgttgttattacattggtttcttttaagtctcttgatttgaattttgaattttaatatctttttcccttttaacatctcctcatcaaaccatgcttagatcattatcaaatcaaatctcaaaacatcaaagaaatgttttgagattaaattctaaaaatggtaatttattcgttaaaaattcaacaatttcaattagaaattttggtcaagattctttccttcaaggtgaaaatgcttcttatgttgatgaaatgtatgaagcttggttaaaagatccaaattctgttcatatctcatggaatgcttattttaaaaatttaaatggtaatagacctgcaagttctgcttatcaagcacctccaactataattccaaatccaattggtactttatctttaactcctgattcaaatacttcaattggtggtgaagatgttatgactcatttaaaaactcaattattagttagagcttatgaagttagaggtcatttaaaggctaaaattgatcctttacatgttaaatttggtgaagcaaagaataaaccatctccaaaagaattaactttagaatattataatttatctgaaaatgatttagaaaaagaaattactttaggtccaggtattttaccaaaatttaaagaaaaaggtattaaatctttaaaattaaaggaaattgttaattattgtgaaaatatttattgttcaacttatggtattgaatatattcatattccttcaagagaaaaatgtgattggcttagagaaagaattgaaatcccaactccttataaattctctcctgatcaaaagagacaaattttagatagattaatgtgggcttgtgaatttgaaaatttcttatcaactaaatatccaaatgataaaagatttggtttagaaggtgcagaatctgttattccaggtatgaaagctctgattgatacagctgttgaatttggtgttgaagatgttgttattggtatgccacatagaggtagattaaatatgttaactaatgttgttagaaaacctgctgaagcaattttcaatgaattctccggtgttacaattaaagaaggtcaaggtgaaggttcaggtgatgttaaatatcatttaggtatgaattatgctagaccaactacttcaggtaaaactgttaatttatcattagttgcaaatccttcacatttagaagctgaagatggtgtcgttatgggtagagttagagcaattcaacattataaaaatgatgttggtgaatttaataaagctttaggtgttttattccatggtgattctgctgttgcaggtcaaggtgttgtttatgaaaccttaggtttaactcatgttccagcttttgcaactggtggtacaattcatgttattgttaataatcaaattggttttacaactgatccagaacatgccagatcaactacttatccatctgattttgctaaaactattaatgcaccagttttccatgttaatgctgatgatgttgaatcagttgtttatttattcaatttagctgcagaatggagaaatacttttaaaactgatgttgtcttagatgttgttggttatagaaaatatggtcataatgaaactgatcaaccttcatttactcaacctttaatgtatgatattattgcaaagaagaaacaagttttagatatgtatattgaacaattagaaaatgaaggtactttcactgctgaagatattgaggaacataaaaaatgggtttgggatcatttagaaaattctttcagtaaggcaaaagattataaaccagaatcaagagaatggttaactgctccatgggaagatttcaaatctccaaaagaattagcaaatgaagtcttaccttcattaccaacaggtatttctgaagaagttttcaagaaagttggtaccgctgttggttcatacccaagtgattttaatgttcatagaaatttaaagagaattttaagtaatagagttaaatccattgaatctggtgaaaatattgattggtcaactggtgaagctttagcttttggttctttattattagaaggttatcatgttagagttactggtcaagatgttgaaagaggtactttctctcaaagacatgctgttttacatgatcaaaagaatgattctcattgggttccattaaagaatttaagtgaagatcaaagtgattttgttatttctaattctactttatctgaatatggtgttatgtcatatgaatatggttattcattaacttcacctgatgcttatgttcaatgggaagcacaatttggtgattttgctaatactgcacaagttattgttgatcaatttatttcatcagcagaatctaaatggaaacaaagatctggtttagttttatcattacctcatggttatgatggtcaaggtccagaacattcatctgctagaattgaaagatatttacaaatgtgtaatgaagattcaagaaaattcccatcaccagaaaaattagaaagacaattacaagattgtaatatgcaagttgtttatccatcaactcctgcatcaattttccatttaattagaagacaaatgcatcgtcaatttagaaaaccattaattttaattttctcaaaatctttattaagacatccattagctagatcatcaaaggaagaattcttaggtgatactaaattccaaccaattttagacgatgttgaattaggtaaatcaattaataataaggaaggtattaagaaattagttttatgttcaggtcaagtttatactacattacataagagaagagctgaattagaaaataaggaaactgcatttgttaaaattgaacaattacacccattcccatttgctgaattaagagatacattaaagagttatccaaatgttgaagatttcgtatggtgtcaagaagaaccaatgaattttggttcatattcttatgcattaccaagaattattcaaactcaaaatgaagcaggttttactgttccattaagatatgcaggtagaaatccatctgcttcaattgctgcaggtaataaagcattacatcatgttgaagaagaagctttcttagaagaagtttttggtaattaattgaattacttaaacttttaatatgttttgatgacccccctaaatcctttttactttttgaatttattctttacaatgatgattgaagttgtgtttttttttcttaattcttcttcttcttcattctttatttatttatttattctaaataataatatatatcatatatctaaatctatttattcctatttataaatttttgatatcataacttgttaattttatcgttatagtttgaaagtacgaaatagatggatgattcagttatttttctgggaataataaaaaatctccgggtaaatcgcgtagatgattcattaatggggtttactgtaaacaccggcgacaatttttgaatcatcgaagcctgaatatcatttttcaataatatatggagacaatctgaaaagattgaaaaatgctctataaaactataataataagtacaaaaaattacttttgtataagagcaaacagttcaccccaaaaaagcaatacgaacattatagaaaagctcattcctaattgggtaaataataatttcctgaaaactcttaggggcaatttgacattttcatttcataaaagttatactataatgttgccctgttcatagcaattacctttggaaagtaaaccaaatacattttctttattatttgccactgttttcatttctttctattattctgttttatttaaacttgaacttttcaagataacaacatcaattatgataatgaatactatttcacgtacatgtgtaattttaacatatttattaccctttgtttattcattaattcatccagttgaaattagaggtaatcatttctatgattcagttattaataaaccggtatgtattataaaatcattattttgactataggatacatttttactaacatttattcttgctaccattaatttttatagtttttcataaaaggtgtagattatcaaccaggtggatcaagtggtgttaatgaacatgcagatccattatctaatcctgcgcaatgtgctagagatattgcattatttcaagaattaggtattaatacaattagagtttattcagttaatcctgatttaaatcatgataaatgtatgacattattagcagctgcgggaatttatttagttttagatgttaattctccattagttggacaacatttaaatagatatgaaccttggactacttataatgataaatatatttcacatgtttataaagtcgtcaatgaattttcaggttataataatactttagcattttttgcaggtaatgaaattgttaatgataaaacttctgcatctaattcacctgtctatattaaagcagttattagagatatgaaacattttataaaagaaaatggtattagaaaaattcctgttggttattcagctgctgatgatttatcttatagaatttctttagctgaatatttagaatgttatgaatctgatccattagaaacaattgatttttatggtgttaatacttatcaatggtgtggtgaacaaactttttacacatctggttataatcatttagttagagattatggttcttattcaaaacctatatttttctctgaatatggatgtaatgaagtcttaccaagagtatttaaagaagttggttcaatttattcaaatcaaatgacaaatgttttctctggtggtttagtttatgaatttgctcaagaaccaaataattatggtttagttgattatgatgaagcaggtaatgttaaattattacctgatttttttactttcaaagaacaaatttcaaaagttaaagatgtaaaattatcaaagaaattacatttacaaaaccaacaagctacgaatggtaaaggttcaagaaaaacaggtcagaagaataaagtttgtgaattacaatattctaatttagatatttcaaaaggtattccaagatcaatgggtctttcacttgttaagtcatttaatgaacaaaataagggtaaatttgttgttttaacacaaagtgacttagttgctaattataaggtattttcacctgatggaagtttattatatgaatcactttctgtcaaacctgttccagaaccagttgctgatccagaggattcaatttcatgtgagtattgtgatttagaaggggatgaaaatggaaatgaaaatgaagataaagttaaagataaagataaaatcaatgaagttccaaatccaattattgaacctgttataccttctccaattggtgaagaaaacgattcaataaaagatgacaagaaaaatgaacaagaaaaagataaagaaaatggtaaggaaaagaataaatcaagtaaaaaaaagaacaagaataagtcaaagaaaagcaaaacaaaaaataaaacaaaaacaaagaaagccaaaacaagtacaaagaagcaattaaagcaaaagcaaaagaaaattcattcaaaagttattgcacaacaagaatcaaaacttagatctaaaacaaaatcaaaatcagtttcgaaatcaatctcaaaaacacgtattagtgctatgaaattgaaaaaagctgatcaagaacctattgtagagaataaggctatcaataaacttgagttgttcattaataaaccgaaaagttcctgaaaatcatatcaacaacaaaaagaaattcgttaaatcaaaacttatcttcattttctttcacatattccctgttttttttaacctaataagtaaatagaaatgtatactaacattcaaattactaatatagcaacatccaaaatgaatccattattttctttgatttttggtatttcacttcaatctttacttggtggattgttttgaaattaatacaagaaaagttttggaataattaatgtatttactttaaaaaaatttgtcctattgcttattttgcttaatgtgtaagtacatttatagattcgataaatgaagtaatcgtttttagttagttaataaaaagccaatttaaaattcaatgaagttgatataaagtttataaaaaaattcctaaaatctagtaaacgaaacctaagattttaccagagacgtgctttctctttgcttcttcgtgatccataatacctgcagaggtggttaagataacgtaaccgaattgtcttgctggtaataagttatcagtccatttttcaatttcgttaatcttaacgttatatcttggttgaataacaccacatttgtttaatctaccgtttaattgaatgacaatcttaccggatctgtgatcatcaatgtattcaaattcaccaatgtaacctataatagagaaaaacaagagaataatgttagtattcagtatcatttgaaaataaaaaaaaggaaagagatattaaaatgtaacaatcaagtgacaaaatttaaacactgtgaaaagtatttgaattactaatcgacacttgaatgatattgatctcccggaaaattaaaagacagccagctactgataacaaaccaaaattattgaataattaagattcaacgtcaagccatccagttatcattccggtgtatgtaaaataaagaagacaaataaaagaatggaagaaagaaattgttttaatacataccgtgcttttgcataacagataagaatttgatgacaacctttgatgatggtctaataaggacttgtctcttacctgatttttctgcattgttaatggaatttaatgcgtctgctaaaactgaagttctggtcattttttaattattctataataaagaatgttagtatatcaaagaccctctttttctgtatgtaaaagatttacataaaataaaaaataattcatattgtgatatattcaaaatagtaaacaagccacatgagtatccattaaggagtcatgagcaaatggaaattaaaataaaaaaaacttttaacaattccattatgtatttgggtattatgtggcataatgtgcacattatcaacttattcagtttcaccggaaactgtataggcagatcaacgaaacaaatgtcaaggcataatttcaaatacattctatttgattttgtataggtggacagggcttataattaaatttctaagtattgatattcatgatgtttgctaactataatggggatatctatcagtgttaaagtgcatcatacgtacgatgaataggattgttcttgttgaaagaaaacagttactgtaattcctagtgaaaaatatgagcgaacactctttcttttatacttgcactttgcaaaaagtgaaaagttgagtgaaaaatttcagttcaacatgaattttacagagggcgggtaacttgtttcttattgcctgttcttctgtgcttcaaaggtgtatatttatatttgatggtatatatctaaaattggtatacactgatagattattatggatgcagggtccgaaatattccagcgtgtgaaaccgaaatgtgtggcattggttcaaatcacattttcagacgatacttttaataatactaccccaatagaattacataatgcattgaatgatttggataaaacgttaattgatagtgtcaataatgctaataggaaatatggtgatgattttgttatgtctccagcattagcagattatataatggtaccattgagtaaaatattgaagaaagaaacaatttcaaatacagaactagaacacgttctttcaataatttacaatttacttaaatattcttggtgtaagaagggaatactttctaaagaattatttattcaatacataacgttaatcacattttttattggtggtaaaccgggacagttcgtatttactaaaaattcggatgaaaagtatttaaatggtattttatgtattaaagaacttttaaaaggatgtttaaacaatggacctgacttttttgaaaatataataatgaatactaaattcataccaactttaggttttttggtgactattttattaaatatagctaatgattctaatacttctaatgttaaaacagaatcattagagacactaaatacattattccatcttattaatgatggtgaaatactttcaatgtttttccccggaactgtttcaacaattgctaaaattatcaaatcaaaaccacattctaatgtaattgctatgtcattcactacattatcatcattgacaaatctcacattttctgatttcgatctaaatattgaaatggaagatcaaattgactccttgaatgcattaaaagccaatataacagaatcatacaatgaagaagacatgcatatagaaattgatcttgaaaaaagtgttgatattagaatacctgaaaatattaattcaaaagagaaacgtcgaaccactaaatggttatcaagtacaattcctcaatttgaaaaagctttaaatataatacttaacattgatttagtcaaatatgaaaaaaatgcagttagagagtctatgtttcaatttaatgtgaaacttataagaaattgctttgtttcttgtaattcgttgattcctcttgttttacattcattggcatcggtatgttattccgattcaacgtatacaactcttacgatggattctctatgctatatttcagagattgattttttgaaaaaaatcataatacaacaattggacgatgaaatatatcgtatgcaacatgtacttttatctcctgattcaacgaaaattgtaaaattgtttcaagccattatattaaatattgaaattttaaatggttgtgcaggaatagataaaaatattttagatgatctattagcaaaaatacaggagagcatctcgttcattattaaactgaaaacagctgatgatgctaaaaggaaaatgccagtagaatcaagttttgaatcacatacaattcaaaatcaaattatgttggtcacctcacattataagttaaactcttttgaagaggttcaaaatgagtacttattttcatccgtatttactaaagaaactgagcacttgtttcaaaatttatttgaagttatatctaaaaattgtgcacagatgggaactatggataaatcatttaccacaattcaaaatggaagtaacatgattgtggaatcagcagtacatagttggatagcctcaaatattattaagtatgcaagtaaagcttcagaaaatgttgttgatgcgtttatgcaatttgatgatgatgatgatgatgatgatgatgatgatgatgatgatgatgatgatgatgatgatgatactaatgatactgaaaataaggaatcttctcttgtattacaaaacatatgctacttatcattggaaatttcagtcaatacactaaagcaatgttcatatctgacaccttcttcctacaacacaaaattatctactattatgtcactacgagcaatcgacaactctatgtcacttctcaaagaagactttgaggatgaattaattgatgtattatatcctgttgttgaatgtttggcttcaagtgatgaaaatattagaattgaagcgcaaaaagtttcattgaatattgcacatttactctatgatggatccattcaaaagatgatatcagaaaactcagattatttagttgactcattatcatctaaacttgttgctgaggaattaacacctaaagtgccaattattttatcagttattgttaaacttggatctatggatattgttgctgaacttgatgatatcattaaaacgatattcacattattggatatgtactatggttataattctctagttgaaggttttttcctggtgtttgatgaagttatttcaaaagtttatgatgacttaaaggactgggattttgacaaatatgcactggatagcgctactgaaaatgttgaatattttggtatgtggggtttaaaatcagaagaagaagttgaggaatttattaataagaaagctgaagttattgatgatattatgcaagatagtgatgatgaagatgatcaaaatgaggaaattttaagaaaagataaaatattagaaattgattctgatgatagtgacggtgaaagtgattcaaaatctattccttcagtaaaccataatgaccaggaggaggatgatgatgactctaagtggacttcacctattgagtataagctctacacaactatatcaaatatattatcttacgcagaaagattgatgcaatccaattctatacaattggctatcattcttctaagaattattaacagagtcttgccccttttagcaacacagtactcaaaatttttacctctagctgttcaaatgtgggaacttataagtcatactatcaatcataccgaagatttaagagtgatatcatcatgtgttgatattttccaaacgttagtcaaatatggaaacacttttttcactaccagatttattgatatttacaatactctaactaaaagcaagagattaagaccaataattgaaaatcaattaaagagagtcattcaatcacagaaaaataaagttgaatctaaaaaagttaattttacaagtacatctactaattgggagtatgaactattcaaaaagatttgtgaattcttagtctttgcattacaaaaattgggaagatttattgctaatgatgtggcaatatcaataatcagtattacaatttggtataatccaaatataaatgattatggatattttgatgaactagctatatttttatcttcatataagaatgagaatgatgtagtttcaaaattaggtttagattaggattatgttataacacgtttgtataataaaaaaacttcaaataagtttataattaacctagaaaagacggtggttgacagattgatacacataaaagcaggctaaaagtaaacaaaaaaacaaaagacaaggtcgtacccggattcgaactggggttgcccggatcaaaaccgagagtgataaccactacactatacaacctttgttaaaaatattgttttacgccattttatttttttaaatgtgttagtcacgtgatattaatttgaaaatattaaaattgtggtagctttcttaaatgagattatttgttgctgaaatgaattttataagtgttaataggtatttttcttttcacaacaatggttttcaagttaattaaattaaaaaaaattaaaacgtgtattgtaaaaggaattttgttaaagaatacatgagaatattaaaaatattttgatctattaagagtaaattatgaatttataaacggtttttacttaaatctagttatagaatgcatctcttacagcagaggttgtgtctctgactaaattagcaccttgagttaatctttcattcataaccatggctgtatgtggcatacctttgtagatatgaattgtactttgaacaccattctttcttaacttagcatcataagcttcagcttccgaccgtaaaacatcacattcaccagcagcaataaaggaaggtggaacatttttaaaactttcatcaggatagaataaaggacttgattcaggttctgttaaagtttcaccagcttttggtaaatatatctttctgaaccataacattttggttgctggtaattgaggagttttttcattctctttccatgatttttgagtttcaccagttgcagaattatcggtaacaggaacaaccatcatttgaaatttaattggaggaagatctttagataatggagaagctgcatatttatgacaaatcatagctgttaaattaccaccagccgatgaaccagcaacacaaaccttagtattatcaatttgaagtttagaaccttcttccataacatataaaacagattcaaatgcatcatagacacatgctggatatggatattctggagctaatctgtaatcaacagtgatgacaatacattttgcaagtgttgctaaatgggaacaatatgaattttctgtactaataccacctaaaacccaaccaccaccgtgaaaccaaacagtacatggccagccatcttttggcatttcaccctttggaacaaaaactcttgcaggaattgtagtatctccttgttcttttgtatgttttcttgggatttcaatatcaaagagtttttcaacttccattggtggagcttgacctggaataacattacctccagcctttgttttagcaacagggaatttatgagtttctaaaacatctggtctataacataaaacttcattaaagaattcaacatattcaggatcaagtttatcgatcattgaagaatctaactttaatggtaattctgaaagaggttcaggccagctgtaatcttcatttataatggtatcgtaaattgacattttggtttctattgataaaatgttagtgtttgtttaatggatgttttaaatgaactattcttccaaaagaagagaacaccacatttatttataaaagtaacaaaagtgaatatccgtacatttactttagaatgcattctcatgataatgaaaaaactatagtggggggatttataggattttgttcacggctcaaatccaatgatctccggacattcacttttacacatcaaattcatatatctaaaatgtgtttccttttacaataaagataatgcccttgaatgtatattatgactagttctgatacaaagaacacattgttaagttggggggtacaacttgtaatcagctcaatccatgaaaaaaataacgccccacaatccatttatttaatccgactctttacaaatttctatcctattattaaccactatcacaaccatattttttacttatccgctattgccccttcaggtaactatcctacggaattcccttcatgataaagaacttccccctaagaagtctccctccacccactatataaggtttgatggggggagtgatccctcttatcgcggtcatcttatcagaaaatatttcttttttgggcatatctattactgataagctagtaaattgtgttaaaatgactaatgaaaagtcttttatctaatctaatctatacatcgtacatatcgtcacagagaacgtgttttgatccagcactccttttgatacagttaccaagtaattttgcatattctctaccaacttgccattcacaacccagataactagtctctattgttctaagtaatccaataagatgattcaatccatttatttcagttaatgcatcacaatatgcctctattgcctttttgtggctttttgcatccatatgattcaaactgctaaatgtattcccagttttctttgttaaagctgttctaattcttcttaaataataacttccatcttccatcgctggaatgaatccacttttcaattgttgtctaggatctggtgatttgaacatagattcaggtccatatacatgaaatgcatatgcccaaagtgataaaattgcagatatgatgacatttggtctataaataaatgggtctttatctggttcataataatagttaacagtttcaacagatccttccggagatagtaacagttcacttaacaaaatcaatgaattaatgacagacaatttcccgtcaccctctttacaccatttatcaattcttttgacaactgcctcataatcctctggtaagatgggaacattcattctcttaggagcccctgcaaaaacaatataatcatagtgtgatattcttaaatatatttgtgcagcatgataaacaggaaatttacatctggtgtcctctggcatcaatgatggtggtaaaggcggtgatgttgcaccagcatagtatacacttgataatgtcaagcagcaatcaccatccggtaattgagatttccatgattttatagcagtggaaatttcattcctccaatttttttcaaatgttttccatccaaaatttgaccattgtgaaatattttgttctatttgtaaaattagattaatcagtccagataataaaatttgtctaccaaatgaatcaacatttacttgttctcctttaagcaaattttttaaagcatcagaaaataatggtgtttcaacaacatgatttgaggctttgtttctatcaacatttttatattcccaaatattatctgggcatggtaatgataactttatttggtttgcaaatatactcagaggatgcccaaaaacaattgcatgtatagtatcaatattaaatgacatcaatgctgcccttttcatagactcactttcaatccaagtatcccatagatttatttttcgactcgtatcagatccatgacttttcaaaggatcaccacctaagataggacttctccttaataattgtattttagttccattgtatatacaagctctttcatgtaatgatcttttaggacttataatttcgtgactttctaatataattaaactttgaattacccatgatttacacggtggtttcgcattttcatttgcaaataacagccatcttaaaggttccgcaatagtaattgctaaattacttggattctgtagtcgtataatgtccggtattgtaacttttttggctaatgatgcacctgtcataattaaacttaaaagaaaaagggggtgtgcttcacttgtagaaaatgaaggtctatggattataggatattgacaatgatataatgaccagtaaagttctaaaaaccatttaattttaggaattgtaaaatctggattatttttcaactctggaatatattggatcatattattaataatcttttcatcaacttcagtttgacaattttcattgggaaattctggagataatgcaaaaactttttccagcattgaaatggtattcataccaatcggatcgtcttgatttgtatgaaatgcaccatctgaaatttgatccaaatataatgcgcttgttggggatacatcaaggggatccccgagaagccaatgaacaatttcagaagaatatataggggtagtactcgatttattgtgatcaacagaattattttcaagttctttagtataattaatactcctatgcgagcttgttatatgttctggaatactattattgagttctttgggagtcaaattactcgatgatgatgaatcaatattgttggagattccgatattactcatatctagagggagtatattatcatttaggtccttggtattttgagttgtagtatttgtccaattttctcctgaataatcttcaattacaggactacccgagatatcattacctgcttgaccaatatttgaggatggtaattcctgattcgttaaaccatttgaatttgaatcattttcattttccgacaaaacatatccattattgttattatactgataaaacgtagtatttggcttattatgtgttaattcatgtttctttttaacatccgatctggtaaatcccttgtcacaaccaggaaatccacaaacatgtctctccgttgaatgaacaacttggtgcctcgttaaatgatctgatcttgagaatgattttccgcaaccatcaaccttgcaaataaatggacctttacctctctttctcttcttttcgatggacacagtcatgattccaagggaagtataagcctttatcaacgattgtttctctacaggaaaaaccttaatgatggtcttaaaatttgttttcgtcggaatcaaaagttttttttagctccacgaaattttaattagtggggtgaatttttgtgtcatattgatgttttttctttgcaaaataacagtgtttattatgtgtcatcagcgcagatatattaataaaagagatgttgatattgtaagctaaataaatgacgaaaaataattaaaagaaactaaggggaaaaactaaaaaaaaggatgtaaaaaagctacagaaaatgaatatctaactatttctaatacatccatctgtatttaggattacttggaccatcataaagttcagcagttggaacatctctataagtatgattaacaccttgttgtctgtttctacgacggttatcaaaaatcatgaaaagtaaaatacctaaaaccattaaaataccagcaccaccgaaaccagcagtaatacctaatgcaggaacgtattttggagcatcctttggtctgaaaatgtttgttgcaattaaaccagcagcatttgcaaggggaacaccaacagctgagataactacacgacgattttcatttggtgtattattattataccaagttgaagttaagacagatgaaactgaagcaccagttgtcattaagaaacaactaaaatatgcaacaccaatatgagattgtgtatcgatacatccgaaaacaacaaaaccaatcaaagtgactataagaccaataacaataaatatagatctgacacgtgttaaatcagaacagaaacacaaaataattaatgcaactgcaccccaaacatttggtgcaacagtgtataaattggtcataacagtacctttacctaaagaaccaataatttgaggaaaccaattattaatagcatttaatggaacaccaatgaaaatttcttggaacatccaagcaatacagacaggatgtttgaataccttaattgcatcacggattgatactttttcagcttgaacagcagaagaatcaagttcaattctttttctagcacaaattttttcttcttcacttaagaatttagcagaatctgcacttctaggtaaataaaggaatgcaaatacagcgataataacagttgcagccccttcaattaagaataagatttgccatccatgtaatttagaactatcaatttggaaaacaccgaatgataaaagaccaaaaaatgcatttgcaatattagcagctgaataaaaaattgataatcttctagctaactcatgacgacggtaaaaagtacttaagtaaaaaataatacctgggaaaaaggcagattcgcatatacctaagaaccatctagcagtcattaaagatccataattgaaagctgtagcttctaacatactaattgcaccaaaagtaaacattaaaattggaataacatttgcagcattatatcttttaataactaaagctaatggaaaagcgaataaaacgaatgggacatagaagatggataacatattattccattgctgaccaacaatacctaaatcttcagctaaaccatcagttttagcatttgaaatgttacctttatctaaagcattaaataaatacataattgcaagtaatggtaaaattcgtaaatcaaatttccaacataattttttttcaagatgtggatcaatattataagtttctaaaatttcattatttttttcttcaattgaagcttcttgatcaatagagataacatcgactgattgatgttgtttaatacttgacccttcgtatgttattgtcatttcttggtttgtctctgatgagcttttgaatgttatagtcatgatagaaattcaaaaatttatatttgaaatgatgaatgaaatattgagtctagtgaatgaaacttgaacctttataaacaaaacgactgatgaaaataaatttatagaagctaaagataagataaagcaacaaatggtacgttctatctatttcggtgttagataacaaataatgtatctattgatatgataagtgacattaatggtgttaaaaataatcaagataatgaatatcttggtgtccattactgaaaaataacggacaatttcagttaccactataaatttcagggtcaacaaaaaaaaaaccgtcgtcccctgtgaatcgctctatagcttaggtgagggataagtgtattacttctgttatataaggatctatatatagtatagtataaatgtgtgtcggttgtagtcaacaacgctcgacgtccaatacctcgctcatggcaattccctaacctgagatatggactatacgtcggcagtgtcgtatgtacgccctgacataccccccctaatttgatacaattgattaatggtgtcgaattatatggtaaattaagaaaaatatgtagagttttgaccgacatagagtgtagtagtctgaaaagcaacgttcatgacgattttgtgtcaagtgtagggaaaaagttgaatgataataaaaacctactaattgtaaccaggcatctctatgttaacatggattgcgtgcaaaaacctgtgatgaaaattcaggaaaacgctgattcatgtccttgtttactcaggtaattctgaaggataatctgacttgcagctagtaccatcggtggaatatcagtagtattgctgttgtttccggttgattgtaataattcacttggaatgagactgttaagtgaattggcttcgggcaacgttgtgattatgttttcagtattggttggttctaatttggtatgagtgttgaatttaggtgaaacttcttcaataaccttggaaattaattgttcatcttcaatgactaaattaaatgctgtgcataacttggtttcagtgagtaatctcttgagatcatttccacgaagtggtttggttaataaatcagctggatttagttttccggatatgtgttctagttgaaaataacctgcattgtatgatgattgaaggtagtacaaacagttttgatatgttagattcagtggtttactatttgcattgaatttggtgacgctattaataactgataggttgtcacagtaaacttgtaatgaaatatttttaaaacctaaatctttcaaaattggaatttgtgctagtgcatgagtaacaccttctctcaaggcaagcatttcagaatgataactagatgttgaagtttctttaattcgatagctcttagatccacaatatttaccgtccaatatcattataaatcctccctgactactatgagctgaccttgctgcatctgtgtaaagttcaaggattgtggattcaggcaattcagctgttaactttgggaatatgtacgtggagtttctggtagtgtaggcaaatcttaaaacttgaagtgcttgaaaaaaaattgttttggtgtaggcatggagttatactgagcaagcaagctagcatgtacttggagatcaaacctacccttatttgcaatataagtaattattccagttaatttttgatacatcttctgagaaaaaagttccattggtgtactattagttgtttgtgctgcattaataaattcttcattgctaacgataacggtgttgagttttaagcattttttaagtgcttttttagttttagtttcactaactcctaagcttcgttgaactgcttgtctcttagctttctgttctgcagttggtggagtgattatgggtggtgcaatatcttcagctgctagtggttccaattcttgcgatacatatgagtttggattcttagggtcttcgctttcaacctcaagtctcaattgtgttgctttttctttaatcggttgaggtaatgggctattttgataatcgatatgaattgatttagcacctcgtttgatataagtttccattacttgtggtaaagtgtcaacaactgaagtaatataagttcctactccaatgcttaaattgtcagaagtttgtttgacatcgtaacctaagtaatactctggatcaggattaattttaattttgaattgttgttgcaggtacttttcaaattcactggtatcttcggcaaatgctattaaatcatcaacgtattgtgcaagaataaaagatttttcctcgttgaaatacaagcatgggtcggatggtgctttctcaagtattttgattaatgcggtatctaacgtcttgtggaattctaatggtgagcggtttaaaccgtaggtaaatctattcagtttcacatgtgtatattgttttggtatattaaatccaggaggagtaggcataatataaattgaaccatcgttgatttttgaatttagaaatgcagtggagatatcataagttgtaaatttgttgcgcgaataagattgaagattgaatattgcccataaagtttgttgttttgtcaccgggctactagagtttttatctctgtggtgcatggtgttttggtcgactgtaataaaccttgatttttcctttccagtgtcactctttctgttaaatcgccagaaaccgaatgatttattataatgttttggtatttgatttggtagaagtggtgtgaacacgtcatgttctgcaaatgaattggcttcagacttaattgcggtagaccattccggtaatttggatgcttgcttaaaattagttggaactgtatctggtgctttaagtatttgattcaatttctcagcatttggttgaaattggataaaggttaaaggattatttttatttcttttcgtaaaattggcgttgattttagtacagttgttgaaggtgcctaatctagtaaattttaatgcgatatcttctgtaccattgagtaaaccaactttaattttattgaatgaatcaattcccaagaaaaaacacgggattaatgtaaatgagttgtttgaatttttaattccataaaatccatcttctaaaaacattggtaattccggtaaggtgtgttgaatatcgataaagacttttgcaggttgggttgacagataattttcctttgcatcagggtctttatattctaacttgtttctgtcataaaaataattataaggtaactccgttgctaatgcttcatgaggtgatctgttgtacaaagttgtggcatgtgctactgaatgttcatagaatcggtcagaaattgcttttggaaggtgacctgttaataatctttgggtttgttttaacgtttggactgtacgctctgcaactccattccattgtttatctccagttggtgctagatctaatacttcatcaattacgtctaattgaattttcttgccctgtaagttaaatattggaatttcaagtttcagttttgtaaattcactgcctttatctgtggtgattcggtcaggaattcttttgaatcggacagaataatagttgaatatgctgttcagtctatcactgatttccattttatttgtagtaacgaatgttcttaaataacggctataatcatccactaacaatactatgaaatttttggtaacttttccgtcaacgatggtttcaataggaccagcagtgtcgatgtggatatgttgaaaaacttcagttgtggtactaattcttcttcgggttgtgactctacctttaaacttttcaactttgcagattagacaaccatggattaatgcagcatcttctggttcaattttgagtcccatttgtttgagtttcctgacagggaaatggttatatgcacaatgtgtacgatatgggtcattctcaggtacttcggtcatagtggtatcaatatgatgtgaatctattgcattaattaattctcgttttctgataggtaagttgatgttaagatgagtggtttgatattcagattcagtgttagtgattgtgtgtggctgattaatagtattgaaatcaatgtatgttaatttcccagaatcctttttctctgttacaagaataggtggttttgaatgcttgttgttgaatgtggatataatatcgtatatatgactttctaaattgatattcttgataacattgggtggaatcatgaagaggtaatttttagtatctatggtgataaatccgattcggttaagctgggtggtactgataatatcagtggttgtagatggtaaatataagcaatcaattgtgtgtcccaagatgttgatttttgcgctaccttcggcgtggatcatctggtttccagcaagcatgattgatgtattacctggtttaaaattgaacgtgttatctaagtcattgacgacactttgggaagcgccagagtcaattaacattggtctagatggttttcggatgcaatcttgtgaaatatttgagttattagtattatttagaactatataatttaaagatttttcggattgaaccccgtgttgttaagttttattgttctttttctcaatcttcatggcatgataagcatatctattgtaaaatctattgattttttgaccactattgtagtgccatggatgttcgtggggcttatgaagtacaccacaagttttacaccattttaattctggcgtgtttttaacgtcctcgggtttgggcatatttaatggacgaggtttgaagacgtggttgctcaactcagtcaattggactggtgttaatgcaggggttggagtagtatctggtttcaatttctttgctgggagatcgcctgctgaagcatcagaaatcttatgcttagctgtggtgtggttagcaataaactttttagggtgatcgaatttgaaacctacttctaccaatttgttagagtttgaaaaattagtgtcttgatctagatcaacaaatggctgagctaaacctgaataatctggagttgtcgcttggcagaatttgtttagttctggaatcaattgttgggctaacttcgagtggaactctgatttgttaattctaaccatgtcttgtaaaaataacatgatcgggaataattgtagttgatatttggtgtatttagatgtaatttcttgaatttcggctaaccgttcataaacaaagttggagtcaatcttttgattaccttttttaaaagctttatttgtaaagtggctgttgatgaattctgaaatttccaaaaccgtaccaactggttgggtccaattggaattgttgtgcactgtaagtaccaagtgtaattgcatttgaagaggtatctgtaagatgtttctatcggttgcaaatccattgattgtcagtgctgtttcaatttcctttttcagcggacctctcatagacttcaatgcatcggataagccataggcttcaaaaatagttgagcagaagtacttaagcttcgacatggtgttgccgataagttgctgatcggtgtatgaatagcagtgtaaataaataatcgatggtaatgatgatgttgtaattttttttcatttctgagattggattcatctaataaagtgttgattaaataatgtaaaccttcttcattcataagttggatcatagtttcaatacattccttcgcccatttgtcctttgattttcctttgaactttttggcatagtgtaactggggagctttggcgatacaggatgttttccaatcttcaaatctgtccgcaaattcttttgcagcctcagctctgtcctcgttggattcaatatcttttggaaaaattaattcatcctgagtgtaaactggttggtgttgatcgagtgatagtgagctttcatcctccattaaagtatcactttgggcatcggtagctgttaatgtgttagtttctaaaggtgcatcattggtttcctgggtttcggcgtttctcctttttgtcctggtcatcataatagtagtaactaattggatcttaatctgtgaatcgctctatagcttaggtgagggataagtgtattacttctgttatataaggatctatatatagtatagtataaatgtgtgtcggttgtagtcaacaacgctcgacgtccaatacctcgctcatggcaattccctaacctgagatatggactatacgtcggcagtgtcgtatgtacgccctgacatcccccactccgataagcctaatacagtaagtgggggcatgtgtgattatgtaagcgttgtgggggggagttgtctattttcttatcagttaaagtaacatgtctattttttctaaagtctatcttatacagattcgttacatgagaaaggaattcaaaatttctacactgtaaacagcattcagtccaagatcaggtgaagaccatgcttttctgtagaaatcaggcaatttcctaaatgctacaattccaaataattctcttaatttagtcatcttctgtaggaaaaattcttgatgttcttttttcaaagcacaagaacctaatactgccattgcaaaaacaagaactgtatgcacattactgtgaggacttagatttttaaatgcatcacaggctagctgtaatgtgtgttgaactagtacatcatcagtttgaatttcgggattaagtaatttggaagaataaataaaaactgctttggagattatttctgctgcataacaactctccaaaagtttcttttgaactgtctctggctcggtacaataaacatcaagtggtaagattggccttgtataatagtttgcaacttttctaatctgttctaatagtttcctatgttttggtgataatggagtaaaaaaagcaatccaacatgcttttgcttgtagttcataaactggtaacgcagctccagcaacagggtgattcatccacggtacagcacatttatacaatggttttgataaataatctttcaatgcttcaaatactatgaaaggtgaagtgatttgatttataagacttctatcacatgcaaataacatactagtatagttgaaaacaaatgattccaacatggttcgttcatagggaaagattgaaatttcattattattcgtcgatttattgttcacatcaaactcatgaaccagttcattgtttaacaacgtgaatatttgagtttcaaacgatgtggaatcaagttttgaagtgacttcagttgataaagatgttttaaaaggagttttagctaaaaacaatcgacatttatttattatatgaacaaacattatttctgttgagttataattttgatattgttcaggtgggaaaaaatctgctggattatttatatcaatatatgaagcttcatcatcattcattactctaaaagtgttagctgttgacgaagagctttccatattattagcaattccgagggattcatcatccagcacaccaaaattttgagaatctaattcaaccacctccggagcgttattaaactttcttcttcttgcacaccatactttaatagcttcaattgctgcaataatacttaaagtgtgtattacttgactttcataaacaaatcttaactttaaatgaagtaaaagtaaataaataattaaccaagtttcatttccttccagattttgactttgtaaaaatgatttaacttcaacaactgaattatttaatttatcatgacataattgtaacattgtatcattttttgtagttgcatatacaaaagctgcaccacaagaaaaaaataagttttgtaacattggattttctaaacctgttggtataaatgctgaacctggttgaagtttgaaatgtgctaattgaggtgaaacttcaatcataaatccattaacaaatgcattatataaaagcccattttcattatgtcgatttgaattctgtgacattgaaataaacccattagcaaatgttgaattaatttcaattagaacttctctaaacaaaaaatctcgtatttcaatctcagattgattttgtttattatttttaactaaatatgtttttccttgaacaagttcaattttttcttcaacttcttcggcttcttgttcatttaaattctctaattcattagctatttcaacaattttctttgtatctgtacttagtgttgttttttcacttaaactattttgcattaacattggtgatattttttgtggtaaatgaaccaaatttccactcattgaaagtggaggttctagaaatgtttgatttgaaaagcctatagctttttcagacgttaacttattatcagaaacaatattgttaaccttttcgacttcttcagtttccagtggtttagcaagacttgaaatttttattggtttaaaatctgtatcatgtgataaggattgaagtccagatggccagacacatacatacccagacttttgacaatttgaacaggtaggtttgacaccgatacatttgattcttctttttctacaacagaaacaaccacttttttttctttttttaccatcacttgtacccgttggtttatttattgtatcgggtttattagcggaattccctctcttggaacttgttggtttcttgtctgcactagtaactttaaattttgtgaatagagcacttttcattgatatattaagaaataaaatatataagagtttataatatagtccatgccattaccactcaggtatgtttcacacagatataaaattcgaacctaataataatttaattaattaattttttttcaccttccaggataagcttacattttcaataaaaaatcggagattaaagagaaagttcgcgactttagttaactttcttatcgaagagataagagatcaaaaacaccagccgcttttttagcttgtattacggctggtgcctattttaagttatatactactgctacttctacttaatatctatctttatcaataggtatctttataaactaatgcaaatatctatataaatatctaactctatacaatgaaaacaaaaaaaaatctttatttatgctctgatgatttcttcaataacttgagatgccttcactaattcttcatcaaaccatctcttaccagttaattgtaaactaattggagctcccgtgaaaacagttgcatcatcatataatttatattcatattcttcatcttcatttcttggaacatattcagtatctggtttatcaagttcaggatcacatttaaggccagttgggaaaacaacattagggaaatctagaatattccataaacttgtgtacccccaataatgaacagtttcatgaactggtgcaactgaactatataatggacaaagaataaaatcaacatcaagttcattcatttttttcaaatatgcggttctagttgaatctcttaaacctgcattactttgatattctgaaacactttgaccatcaaatccacatccaacatttaattgccatttacttaatttaacaactggttcacctgataattttaaaagacttaattgaccagcatttccgtctgcattataaccattataacatgcttcaacaacttcttttacattgaaagattcccattcaacaactttaacacctgcttgttttaattttttagctgaatgttttaaacctctaataattggtggagttggtttaacaacaccatcatcataaataattgcaactttaagttcctttggggttggagtcttaacctctctccaaggtaatggaataacagttgcatcagtttcccaaggttttgaggataattgaactttcataaataattctaaatcttgtgcagatctagctaatggacctaaaacaacaacaacattttcttgagttttattaccacttggaaccattggaaacattggaattctcttttgtgaaggtcttaaaccccaaacaccacaaaatcctgcaggtgctctaattgaaccaccaatatctgatccaagaccaaatgctgaacctttcattgcagttattgcaccttcacctgatgatgaaccaccaggtgttaaatttgtattatgtggatttttagtaagtccagtaatattattatttgaatctaaatgcattaacatttgtggttcagttgttctaatataaaaaactgcaccagcatcatacaaaatttgaacacattgatttgtttcagttgaaacattatcaattaatccaacataaccaccatgagtaattttacctttataatcataatgttccttaagtgaaactggaataccatgtaatggaccaacagttttattagttttcttgaagatttcatctaattcttgtgcacgctttaaaccttcatcaataaaaatttccattgcacaattagttaattgatgtgccatagttgcacgtttcgcataagctttgaaaacttcaactgatgaatattcacctgatgcaattttatcagctaaatcaattgcttttaattcagtaatttcgatctctgatttagttaaaactttctcaggaatcttagtaacatcaaagcctaaactttgtggaattaaatcttcaggtaacttataatcatctaaaatattgtcatttaatgcttgtctatatttttcaatttttggaataaatttttcaaataatttgatatcttgtgggtcaacttttaatcctgcaccgtcaatagtcatttttggttatgttgataaataatataaacaattatatgaagaaaaagtattaaacctgaaaggaaaacatcacatttaaatagtacatattacttgggaaaaaccacaagaattcaccatcaaagttttacaattacaaatcgacttcttatcagttatcaaaattataaagttttatcaagttgataagtatatactcgaggtattattagcactcgcctaatttcaaaaatttcctaaattggacgtcgtaccttgatggtggacccaagtttattggataatatcaaattcttatcggatctcggcaaacaattctttttatcaattcgggcttgccttatattgcaaaaactattgttatcagagactgataagagtcgccaacttttgtgataatttccgtttatggataaaaattttcgccaaatgatcagcgataagagttgagttttatcttaatgtgctaacgtattgataagattgcggataaagttcctgagtccttatcattaaacaaaggaagagataccaaaataaaaagattgtagatgttcttatcatttttatgatttttggaaactataaagtgagtggaaaagtatctacaattctaaaaaaatattttttttttcttaaatttacactagacaagaaaacaaacagactttatcatgagtcaaagttcagttgaaaaaaaacagaatgatttcaagatagatgttgagcaaatgtcagattcagatggaggacaactagaaattaatggtgaaattgattattcagttgtaccaggtacatcaaatttagttgatatcactaaaactggttccaaaaaagatcaaattgttcttattccaactccatctgatgatcctaatgatccattaaactggacttttagaagaaaaatggttcaaatgttttgtatcattttatattgttatggtggttcagttcctggatgttgtatttattcaattatgccgcaaattgcagcagatccaaatgttaatataactgtttcagatttaaatgcaggtactggttattcatttttatttttaggtttgggtaatttaattatgttaccattagcacagcaatatggtaagaggccaatctatttattaggtcttttaggtgttattggatttaatatttggcaaccatatattcatacaaatggtgaatggattgcatcgaaaattttgaatggtttattttattgtacaattgaatcattacctgaaattacagttactgatatgttttttgaacatgaaagagcaacttatatgggtatctatggggcagcattatttagttcaaattatgcagcaccaatgcttgctggttttgttaatgatgcattaggatggaaatggacaattattattgcagttatatttggagctgtttgttttgttttaatgtttttccttatggaagaaactaattatgaaagaaagattagagttaataaggataaagatggtaatatcattggtgctataacatcaaatgtaactgaaaaccataatttattaaataatattgagcctgttatttcaactgttaatattggtaatcaagcaattctagttgatgatggaattagtggtgaatatccacctgagaaaacttttattcaaaaattatcattaacctcaggattcaaaaaagatttccatttatgggattatatgattgcaccattttatatggtacaatatccaatcgttttatggtcaggatttttatatggatcatcattattttggtactcagttttaaatggtacagaagcattaattttaggtgctgaaccatataatttttcagctgcaatgtgtggtttagcatatgtttcaccagttatttttgttttcttaatttacccatatgcaggttggtcaactgattggattaaaattaaaattgctaaaaagcataatggtgtttcacaagcagaagatagattatgggttttaattgtttatatgattttaggacctgcagcattaattttatggggtgttggagcagcacatggaattcattggattggtattataattggattaggtttacaagcaggtctttgtattgttggatgtatttcatcagttacttatacattagattgttatccagagatgggagttccagcaattactgtattagttataattagaaacacaatgaattttgcaatggattatggtattacaccatttgttactaatacaggagttcaaaattgtttcattgcatcagctttcatttgtttattctgtattagtacatttttcgtcatggttaaaacaggtttcttctggagaaataaacaaaaggagaaatattggaatttagttgccaaatatcgttccaagggtattgaactttagctgctttgaaaaattttttattaattctatttatttatttataattttgtatagttatatttaaatacataacatttctaatatacgttttttttttcttagttcaggtgttagtcattattacaacgctcttggataatcctggattgattattgccaaactttcagtattatttaagttgaaagtatcttcttcaagtttaccatttattggtatttcactatcatacatctggttagtgttgtgattttcattgcttggcctgtttgaagctagttctatattatcaatattgctttggtcttgagctagttttgttaatttattcgcatatacagcagcaaaagcatcaattaattaataattattctagttgtttgcattagatacatcttcagatttaaaatcagtggtaattggttcttatttattatgtttgccatttgtagattgttgatcattattttgttttaaaaagacttgataaatagatcctctgaaactgtaggttgcttttcatgtatgggtaatcattttcagtaacacaatcttagcttcttctgaagattcctgtgcactttctgattcttcttctctgggattttcaaaatctttacagccgttatttatttcaatggccgaatcatttttaggggagataatccctattcgaacttctgcattcccttcggattgttctttgctgctactttgttcaatattccttcatcagattcactagtactagcagaattgttttctccaatagcttgatattgaacaccttgagttttaaattttttattataagatttaaataaaaggtcttggggttcatcttgtaccatttcatttttagaaatctattgattattctctttgctgtgacttatattatgatgtgcaaatttttcttccccttcatcttttaaatcttccatatatattcttccatttcaagtttcatatctttatcactttctttttctttttttcagcttcattatcaattttttgattaaacatattgattgcgtctttatcatctgagtagtttttgatatgtatctgatcttttttttcactttcactctcactttcaatctggttatacttggttcagatgcagcattggaatctggatgaccgatattattatcactatcttcttcaaacaaatcacctacggaaagtttgtcggtacctcaagttgttgataatcatcttctttttgctcttcatattcataaattttttattgatattattagaatctgtattttgcttaatttcttgaaaatgatcaattaagttagatatgcgtttttcttttagttcagcatttaaatatttttgtttgttacgtttattaatcaatttaaatttaagttccaaattgttacagtaatcatcttcagctttctgaaagtctttctaatataaatttgcaaacttgctacctgccactccacggcacactctgctaccactccataagcgcacaaaaaaatttgtggcatcgctccacttcagcgcggatactttatttatttttcacttacgtctagttacatgagtttacctatttgctaaatttagcattcttttccaatgagtagcttaaatttgacttgtaaatcaggtggtaacattttgctattgttaatttaattcccgtaattgattaagttaacaaattgtggaatttaattggataattgtatcaatcatgtcaaagtatatcttaaaaccttaaaaagctaggtaccgttttgatgtaatacctcataaattaaatgttttagtctacaagtataaatatcgacgtttttcttttttgtacatgtgtaatgtagaatcaccaagacccaatgtttttttaattttattctttagcgtcgatggccaattagtggtatatacagtatataatataataagagtaataatttaaccacaagatatatacagtattattctcatagcaattaacgaccttaactatatcggctattgaagtacggtgtaaaatggaaaaaaaaagcaaaaactaaacatttaatagagtatatagagcaaacagccgggatagttgaggtcgctcattggatcagtgtaatataaataacaattgtgtgtaaataacttgtatattaaaatctgtataaaaaccatgcacatgtgcagaaatatgtcaaaaatttgtgtaattgaagttaatcaaatagacaatttgttctatatacgacattacgtaatatatccggaaattcatcaagatacttgagccttcaaaaattaaattacgtaatgtgatgaatcaatttttttcagtttttctttgtttacattttgcccgattaggcaattttttttgttcatttttttgattgatcattaaatcagtagaatatggttgtagtttttgttgaaaaactggaagaagcagaatttatcatgatgggcattcttttgctaagaaaactcaataatggggaggtgtttaaaaactagtaaaccaagtgtacaaaataagacaagtaagactaaaaatgatgttaaaagtaaaaaattatgtataaataaaagtaaggtcaagactactgtcaaaacgacaactaaaactaaggctaagaccaaggtaaaggatgttagaattacagttaatgaaatgagagatcaaatatctaaattagcagttgatgaaactacccccggtatgaaatgtatcacattagcagaattagacaatttaactgatataaaggataatattttaaaaaaaattaataaaagtaagaaaatgattgtacttacaggtgcaggtattagttgtaatgccggtatacctgattttcgatctaataatgggttatataatcaaaaattagaaactgaaagcaataataataataatagtaataataataaagaaattacaacaacacagcaacagaaaacagtaattggtaaagaaatgtttgatatttcagtttatagatcaattgacacagttaagatatttaataaatttatgttcaatctatatcaaagtgttaatcaaggtaaatatactaaaacacatcaatttattaaaggattaaatgataaaaagaaattaatcaaatgttatacacaaaatattgatggattagagagaaattgtggattaagaacagaatttgaatgtaatgaatggaaaaatattgatgttattcaattacatggagatttgcatcaattatgttgtaattcatgtaaacataattttaaatgggatgaaatttatgataatgaaggtaaaagtaagataatacgagaatatgaagaagaaatagaggagaagtttacaaatgatgatgatttaatgatattgtcacaagatagtagcaatagtaataatagtgataatagtgaatcaattttttcaaatgatagtgatggtgaagatataataataaatgaagaagtagaaatcaataataataacaataataataattatggaattgttgaatgccctaaatgtgtacacgaatatgagagaaagatcaagatgggtaaaagaagtttagaatcaagtattggtataatacgaccaaatattgttctttatggggaggaacatccattcagtgaaacatttggtaaaaatttaaacaaagatttaaataggaaacctaatatattattaatatttggaaccagtttaaaagtgagtggggttaagatgttagtacgtaaattgagtaagaaagtacatgaacaggataatggtatagttatattagtcaataaggaaccagttagtaaaagttcatggggtaaagtaattgattatcagattatcagtgattgtgatgccttctgtgactttgtcgagggtgtgaaaaattgatttattatttgattttattttgataggcttttcatgatttcttttattttttttattttctttatgtattgtatattatatctttaagtaatggataatgatgagaaaagtttgagattagtgcatttacagaatatagtacatcatttagataatggagtattgttacgtaaaacagcggggagatttactcaagatatgggaagtattgacgctagagagatgattggtgaattatgtaaaatatgtcaatgtgtaagagtatgtggtataacagagaagagaagattggtatatgtgaaaagggagagatatattgaacgattgtgtagtaattgtgggtataaagaacgagagaaattagagaaacgaaatagaagggataaacgagatgaattgaggaaagatgtagttataccagttgcagtgagtaaggatacggatagcactaaactcaataccaagaccaacaaaccaaaaaagaagaagaagaagaagagtgcattagctgaactgcttgcaaagaagagagagagcagtcaatgctaatgctaatgctaatatattcccgagggtccgagcttttttagaaaattttaatttttttccataacgttttaacttaactaacttagctaatattttctattttctattttctataatcgttaatttaactgacttttcttctttcaccttcttttctgatttcattttcttactatcttacttacttctttctttatccattctacctctaatatgcctaaggatccggcattcccgccagttaataatttatcacctgctcaacttgataatataactgtaagtaaaaaatggatcttaccaccacgtccaaaacctggtcgtaaaccaacttctatggtaaattctcctgaaggggaaaatattgaaattaatgaaattactgataatagtttagaacctactagatcaaattcaatttcaaatgttttatcattaaatccttcattagcttcaactgttgtatcatcaccaaatttatcatcatcaatcaattcttcccattgtcttaattcaccaaatatttcaatctcaaatctttcttcaccatctcctattcccattaatgttaatactaatggtgaattatctcctagagaaagacctgttgcaagattatcgaaatctcctaaaaaggataaagaaattaaaaaacaacaatcaatttcaaagaaaaaaacgatacagttagattgttcaattatacataatcctataaagcaagaaattttgaaaattaatgaagaaaattattatttaaaacttgaagttattagattagtttcaaatcttaaatcaataagggaagaaatttcaactaccaagaaaaatgaaaatgaaaatggaaatgatgttgccattgataataaaagtattaaaaataatgtaaaaaataatactactactgaaataccacctaccaccaccaatgataataatataaaagaaaaaaataataaaagtagtactttaaaaaataacgaggaaaaacaaaattttaaaccccctattgaaccccatattaataaaatacccgataaagtcaattcaaagaaaagatctcatgatgatgatattaatgatttaattgtatcactgattgatttaacacattctcaacaaacaaaattagacaataatagtattacaattaatgaaacccaaaatgaaaataatgaaaaagataatggaaaaaataatgaacaaaataataaaaaaagtaacgaaaaaaataatgaaactaaaaatgaaattaatgaaaacaacagcaataataataatgaacaaacgaatataattcccgatatcaatatgaaaaatatcaatatcactagtatagacaataatgaaagtattacaccgatgacactgattgaaactacaactaattcaccaataaataaactgatttatgaagaagatgattttgatttattatctacagtatcaacaactaatagtacagtattttcatcatctcaaagtatatcaaatgaaactattgatacattatcgtatagcaatcatttacatagtaataataataataacaataatgcaagtacattagataatattgatgaaataccagcatttcaattactagatttaccaaatgacttatcaattaagaatggtaaaatgaatattcaatataattatgaaattccactaattgatgatttaaataataatgataaacaattcaatttattagatactttttcattagttaaggaaaataataataaatttgaagatttatcaacattaaaattacttgattttaatgaaaatttactcaattataatgaaaacgatatgaatgaattaatgatattaatgatataaatgatatagatgggattaataatggacagtcttccactataactttcaacaatgaaaatgatgttgaaatggaatttgaaaactttgtcaatggtactatattctagtatttatgtgtagaaactactattaaataataataataataagaacaatgtattccccaatataatattaatataatctataaatactgagccgagcaaatcggcccatcgacgcaaatccggagtgcacgtgtcttattagtagcttaataaataattagcattaacattttatgcatcttgaaggctctggttgacagatttctttgatttcttgtagttttgccatctgatcttcttttaatttaccattataatcatttcatttattaaataaccattcagtcatgaagttcggtaaatatcttgctgctagacagcttgaattacctgaatattcatcttattttattaattataaacaattaaaaaaattaataaataaattaataaatgataatgatattgaaactggtaatgatagtgataataataataataataataataataataataataataataataataataataataataataataataattccaaattatcattacaggataagaaaggttccttcttttttaaattggaaagagaattggaaaaagttaatgcattttatttagaaatggaaagtgaattaagatttagattagatttattaattgaaaggaaaattaaatcaatcaaaaaaaatttaatatttaaaaattcaattgttttcatttcacttttcgatggttttaaaaaattttcaaaagatttagatagattagaacaatttgttagattaaatgaaactggttttactaaagttttgaaaaaatgggataaaaaatcaaaatcaaagacaagggaattatatattacaactgcaattaatgttcaaccaattttccatagaaatcaaattgttgaattaagtgatttagttgctaataatttattagaattagaagctttaagtaatggtgatgataattttatacgatataatgattcaaaaaatttaaatgatgatgatgattttgttaatagtgttgataatactaattcaattaaaagtcattctgaaaataataataataatgataatggtgatgatgatttcaattcttatgatcaattatatactgatttttatgatattacattacaaaatgcaaatttaccaactaatgaacaattaattaaattaaaagattggtcaaatcaaataatttcaaaattaaatactaaaactaaaaaattaacattttcaaaagttttccaattattaattaaaaatttacaaatacctgatgaatcaattttacaattttatcaatttttcaaagaatttattgatttaaattttgttgatgatcttaatggtagaaattgtattattgaagcatcaatttgtaagactggtagaaatgatatttttaaaacttgtctatattcaactattgatccttcaattaaagattttattggtagatctccattacattatttatcagaaaatggtagagatgatttattaatattaatcttagattatataaaggaaaattttaatgataaattgatttcaattattgattctcatgataatgaatcaatttcaccacttttacttgcaattataaataatcatcaatcaactgttaaaattttattggattataattcaaatggttttccaaaacaaaatgatgcaaaaccaatgtatttaccattaaatattgcttgtaaatttggtaatttaaatattgttcaattattattacaaaaatttggttcagcagaattagcaaaacaatctaatttattaacaaattcatctcaatgtaatgccgaaggtttattacctttacatattgttgcatcttcaagaaatattcaactggttccgttattattggaatatggtgcagatattaatcaacttgataaattaaataaatggcctgctattttttattcagttttcactaatgataaagaaatgactaaatgtttattaagttatggagctgatttaaatatttttgatgaagataattataatgctttattttatgcaatgtgggagggtaatatttctgttttaaatgcattattagattctttaagatataataaaaaattactcaataagaattcaaataatattgatattagtaattcaaataaaattttgaaaccatccaagaatattaaatttttatcaacttcattaccaacacactcattagattcaattattgatttaaataatattgatatgattccagaattatcattacctccaccaattatacctttaagaaaatatggacataattttcttgaaaagagaatttttctaaaactttcatttttcactaatagatattcagttcatttgttacctgatattttccttacatcaatgccgggtagaattacagttagtaataatgaattaattccaagaaatttattattaccagttttagataatgaaaaaaatataattttccaattagattcaattgatgatgaattatttgaaattgattttgaattattcccaacttttggtacaagattattagcaaaggcaactttaacatcatcaattttaaaatctcagtatcctggtttaggtattaaaaatactggttatttagaattaccattattagatattagattaaagacaattggttcattaaaatttacttatgaattaatttatccatattctggtaaaccattagaaatttcaatgtatgatacatattggaaattaagttcatcatctgatgaagataaaaagaaagaatctaatttaacttcatttgttacaagttcatcattaaatggtagttattatactgtaaatgttgtttcattacatgatggtacaccaattatttgtcctaatctacaaattgatattggtaataatgttaaattaccaattacattatttaattatcaacaattaaaatcaattatttataaaaataatcaagatgaattactgaatgttaagaatactttacaaaatttaaattttgaaaatttgaataaatatttcaatgaattaatgtccaaagtttatttaccattaaatgaatttttagaactagtcccatcagaaatttcacttaatttagaaattttctatccgacaacttatgaattagagaattatgaaatgaaagaatttgcatttttatcaaataataaaattgatgaaattaataatgatgataataataataataataatagatcaacagttaataataatttaaataattttattgattcaatattaacagatattttcacacatgttagaaaattaagaaataacaataattcattacattcaagtagacaaattgttttatcatcaaataattcatatgtttgtactatattaaactggaaacagccaaattatccagttttctataatcttaatggtattaaatttgataaaaatattaagaattttattgaatgtacagcaaatggaattttaaaggatgatataagttcaattacaatttctaatgataaagaaaataaatataatgatattaagaataagatattaattgataatattgattcaattaataaagattcgacagaatttacaaatttattagatcatgatgataaattaactagatcaattaaattagcagttaattttgcatgttcaaataatttacttggtattacaattcctgaacgaatattgaatttatcaaatgaaattgttaaatcgattaaatcaaagggattaattttagttgcatcaagggatgatgatataaatgattcattattatcatttaataatcataaagattatgaaagtattgagattgataatgaaaatgataatagtaatgaaaatgatgtagatgatgatggattaaaacatttagaaatcgattcagatattaaggctaatggtattcgtaataacaatgtacttcagtttattgattcaattgaagtatgaaatatgaaataataataaccttttgtataatataaagtaacatttaaactaatataatgtgctacaccttcctaaataggaaactccagacgatattactcactcaaaataattctcaaaatcagaccagttccgcagttctgataaagtccgttatcatgtcaaaaaaatatttctaatctttaatggttgtattgactatttcatcttaaataatagtgtctatgatggcaccatattctacacgtctctaccttcctaatgcggcaggtgtagctgttggatttatcttttgttgaacttattttgctctatcaatgttatacctacataacatcaaaatgtctataaaaggagcacatacccaatgttaaattgaaaaatgactagattgtatatattctctatattcagacaaagaaacaaaaacaaataaacaaacaaataaataaattataatgacagttacaacagaatctcaagttttccaaagagttatttctgaaaaggccccaattttagaaaaggctgatggtatgtatattactgttaaagatccaaaaactggtgaatcaaagacaattattgacgcaatgacaggtgcagctgttggttcattaggtcatcaagatcctgatattgttaatgcaatgattgaagcagctaaaacttcaaattattcatttggtcattatattggtaatgaagcatcagaggatttatcacaatttattatcgatcattctccaaaggatcattttgcatcttgtttatgggttggttcgggttctgaagcaaatgaaaatgcaatgaaaatttgtaaacaataccatttagaaaaaggtgataccaagagatttagatttatttcaagatttaattcatatcatggttttacaattggtgcattatcaattggtgatggtattagaaaaaatgaatttaaaaacattcttttatctgatgaacaaactccaaaagtttcagcttgttacacttatagaaatgttactgaaaaatttactgaggaacaatatactgaaaaattattaaatgaattagaacaaaaatttattgattgtgatccaacaactgttgcaggtgttttctttgaaactgttggtggttcaagttttggtacctgtccacctccaaaaggttatttagatggagcaaaggcaatttgtgaaaaatatggtgcattattctgtcttgatgaagttatggttggattaggtagaaatggtaaatatcattgttatgaaacatttatgaaagaaggtaatggaccagatattatgactgttggtaaaactattggttcaggttttgttacattagcaggtgttcttatttcaccaaaagttaaaaatgcaattgttaatggttcaaatatgtcaaatggtgcacaaacttatcattgtcatgaatttaattgtaaaattggtttagcagttcaaaaaaaattatttaaagaaaatttatttgaatcaggtgcaaaagttggtaaatatatgatggaaacaattgcggaaaagacaaaagattccaaagttgttggtaatattagaggtttaccattatttttctcagttgaattttgtgatcctttaactaaggaatgtttaacaccatcatttggattctgttataaagttcaaaaacaatgtttagaaaatggtattacaagtatgggatttcaaggtacagctggttctacaacggatgcagatggtaatattattggtcttggtgatcatatcagtttagcacctgcatatattattactaaaaaggaagctgatataatcattgaagcatttgttaagtcaattgcagaagttgaagctgaatactttgcaagcaaatagtatcaacctactttttctgtctgtgtaactgactaactacctgactaactaacttttgtactgtataatataaatttataatcaatctgctatatcccataaaaataaaataaaaaacattttcaaaaaagtacccttttttcggctatttctttctttattaatcctttacgtaatcatttctcgggtattttaaggaaggttaatgattccatcaatttcaataaaatggatcacaatctaccattgagtgaatcatcatagaaatatatatcttctaagagttaactaaagctacatgtttatatagacatcacataggaaaaaccgaacatgtcagaaccgtctaaaaattcaaaatttatccctggtattacaggtgatattgaatataagaatccaatattcacaatgccatcaattttacaaccatataagattggtatattatcatatagtgcatcattattagctacatttgcaggttatccattagattcactgaaaactagaatgcaaactcattattataaaaatgcattacattgttttaaatcaactataaataatgaaggaatattaggtcttttcagaggtattactgcaccgttattaacaacttcattatcaagatcaatgacagtttcaattttcacatcttcaaaacctttcgttagtaaggtaataccatcaattaatacaagcaattgggggcttaatccagaaactgaaaattttgtacagaatttcccagtttcatttgtttcaggtctgttagctggtgcaataatttcaacatttgcttgtccattcgaaattactaaaatatttcaacaaattgttatagttgttaataaagattcaaatttaaatctaaagaaaaatgaattaccaacaaaagtttttagtgttgcacgagatattgttaaatatgaaggttggaaaggtctctatagtggttatagttatcatatgactagagatgccgttagtgcaggtctgttttatagtgtctatgaaactgttaaattagaattacaatcaatcaataaaaagagtgattattttaatgataaagtaaaggataaagttgatgcaatttgtgtaccattatctggtgcaatcgctggtgcaattgcttgggctacagtttacccattggatacgataaaggctaattatcaaaaagatgttttaaataatattatacgtgttaaggttggattacctaaattacctgttgttgcaagaaaattagttccaaatatttcaatgtataaaggatttggcccttcaattactagatcaatttgtgttacagcagtttttttctctgcttttgaatatctaatgcaaaaaattgcttaatgatgtttttattatattatattttactgtatatatttatagatctatatagatttgttttaatttcatacactgttcgtaaattctattcttctatttcttttgtcttttggactttgattttgaggcagtttcttcaactttcctttttaataaattcttaagaaatttatcatcatcaattactttgaatctaggtaatccatcttctttattaattggtgggaatttatcatcaatgacacttttcaaacattgaacttcattaaataatacaatatttgccatttccttcttatcagatagattataagattctggtaatttatatgttccatctgttatataggttgggtattgatgtatccttattttgattaattctttaattgtttcaactgttgatttagttaataataacttttcttctaaaagttgatgtgattttaaaattgttctatgtataaatgaaactaattcatttgaaggttttctttcgattgatttaacaatttttttaaaccatttttcatcggattggacagattgataaattgatgttataattaagattaataataaaaattcaggtactacttcaccatcactgtgaacttcatatttttcagataatataccaatatccatatcatcagaaagattttcatctaaatattctgaagtttcaataagttcaaaaattgtatcaactaaagtgtttgattgattaggatctaaaaatttaaattgtttttcaaataaatcttggaaatattcttttattgttggagtttgaatttctgcaaattcatactttgatgatggtaattcaacataaccatattttcttaaaatttcagagtttggtaattcaccataaagattaaaaatttgttcaccctttttaatgtctttttctgcaaccatgacaagttttgtcttttcatattttaatttagcattacattttgtagtatcggagttaaatgtatctgctaatggtaccattgatttaaagtatgagtcttgtgatacaggatcctcttgttcagcttcatcatcagattcattatctgaagttccttcttcatctttatggttgtgttcttcatcttcttcttcatgttcattttcttctccttctccgtgctcttcttttccatcttcttcttcaatttcttcttcaccttcaacatcttcatcatcattttcgacttcttcaggatgttcaacatcaaaggaataacttaaaataagacttgcaatgatatgaaatctttctaaagttaaaaattctgctaattcatttgattttatttgatttggtataatatcagcaactaaaattgaatacatttcctcagctgaattacgtccaattcttgataaaacacctgaaggttttaaatattgtaattcttcatcattccaatacattaaagtattataatcagtgcttttcaatggtaaaacattaagataaggtaataatttagaattttcatttaaataccattcataagctaaacaaataattaatgcttgccattgagtaagggaaagtagaacatcatgtacattatcatttaaatttaaaatagaagcagtttcaacattgaatatagcatcccttgataattcaaataatgattcaccggctttgatatcttcaactgctattaaaccacgaccttgattgatatctcttaaatctttaatttcgaatttatctgaaacaaatgaaaagttttcattgatccatttcttgaagttttcagtgtgtgattcaaaggacatgtttgtgggtatatataaattaagcttaaattgatagtgaaaagtaaaaaaaaatttcagtattaataaaaatgaaaataaaaataaaaatattttttgttaaaaccgttatcaattgaaaaatttaagaaaaaggtgagaatttctagaagcttctctcagtgaggtgaaaatgacaagttggttgattttataaatatcaatggctctgtcaagttgattttagtattcccaattgtatacaatgtcttttcattctttttctttaaatatctgtatctctaaagtaatcacacttattcatagttacaatgtctgctgaagaatttaaacaacaaggtaatgacgcattccgtcaaaagaatttcaaagaagcaattgaatatttcacaaaagctattcaagcatctgaaactccaagtcatgtcttatattcaaatagatctgcatgttatacttcattacatgaatatattgatgcattgaaggatgcagaagaatgtgttaagattaatccaacttgggctaaaggttataatagagttggtgcagctgaatttggtttaggtcaatatgaagaatcaattaaaagttatcaaaaagcattagaattagaaccaactaatgcaatggcaaaggaaggtattcaaagtgctgaagatgcattagctaattctaatcctggtgaaagtatgaatgcaatgtttagtaaatttactgatcctcaattaattaataaattaaaggcaaatcctaaaacttctgcaatgatgaatgatcctgcattagttgaaaaagttaaaaaaatgcaagcaaatccacaatctgttgcacaagatatgatgtctgatccaagattaatgacaattattacaactattttagatattgatttatcacaacctccaaatgctggtgcaacttcatcaaatcaagaaaatgaagatgttaaaatggaagaagaaccaaaagttgaagaaacatcaaaacctaaggcagaatcaaaaccaacacctgcatcatctaaaccatctgaacctgtaagtactgaaaaggaacaagctgatgaatttaaggcacaagcaaatacattatataaacaaaagaagtttgatgaagcaattgaactatataataaggcatgggaaacttataaggatattacatatttaaataatagagcagcagcagaatttgaaaagaaagattatgatactgcaattcaaacatgtttaaaagcagttgatgaaggtagagaaatgagagcaaactatacattagttgcaaaatcatttgcaagaattggtaattgttacttaaagaaggatgatttaaagcaagcaattgaatattttgaaaaatcattaactgaacatagaactgcagatacccttaataaattaagaactactgaacaagaattaaagaagagagaagcagatgcatatgttgataaagaaaaggcagaagaggcaagattagaaggtagagattatttcactaagggtgattggccaaatgctgttaaatcatatgctgaaatgattaagagagatccaactgatccaagaggttattcaaatagagctgcagcattagcaaaattaatgtcattcccagatgcaattagagattgtgatatggcaattaaatatgatccaacttttgttaaagcatatattagaaaggcaaatgcacaattagcaatgaaagactataaattatgtattgatacattatatgaagcaaaggaagttgaatcaaagaatggtaataatccaacacaattaagagaaattgaaacattattacaaaaagcattaagtttaagattccaaccattagaaggtgaaacatatgaacaatcagttgcaagattccaacaagatcctgaagttgttgaaattattcaagatcctgtaatgaatacaattttacaacaagcacaaggtaatccagctgcacttcaagaacatatgaagaatccagctgtctataagaagatcatggtccttatggctgcaggtattatcagaacccgttagttaattatagttaaatactttatactctttatactttgttttaaaataatataatagaaacccttaattgttaataaaatgatgaaattttgaaaattggaaaaaatttactgtgcgtattaattttactctataagtttgtttcctactactggtctctttcttttttttatttctttcttttaacaccactggtggctatgcaggacctcccattgactgtagtgtctgtgctgtctctggctgttggtggtgatgagtgactccagcgttaaaaccatcgtcttgcaggtcttcttaggaattgacccatgaccggatgatgacctactgactggcacattattattatttataaaatgtattagtagtaatatccttgatgtatagtatgtaactgaagatacacttgtagtatatcagtgtattgatgctgaaagtgcaactaactaccatatcttataaattaactgtaaatacagacaactttactatggggcgctgcgaaaacgaaatttgaagcagaaccgacatttattattattattattatgaaagtgttacaatgaccccacatatctttttttattcttttaacagtgtatagtatacatacaaattaatcaacaatggaacagtcacacgattcatatggtcataatcaaacacatcatagagaatccaatagaattggtaaatatcaaattgttaaaactttaggtgaaggttcatttggtaaagttaaattagcatatcatacaacaactggtcaaagagttgcattgaaaattattaataggaaaactttagctaaatctgatatgcaaggtagaattgaacgtgaaatttcttatttacgtttattaaatcatcctcatataattaaattatatgatgttattaaatcaaaggaagaaattataatggttattgaatatgctggtaaagaattattcgaatatattgttcaaaatggtcgaatgaaggatgatcaagcaagaagattttttcaacaaattattgcagcaattgattattgtcatagtcataaaattgttcatcgtgatttaaaacctgaaaatttattattagatgatcaattaaatattaaaattgcagattttggtttatcaaatattatgagtgatggtaattttcttaagacaagttgtggatctccaaattatgcagctcctgaagttatttcaggtaaattatatgcaggtcctgaagttgatgtttggtcttgtggtgttatattatatgttatgttatgtggtagattacctttcgatgatgaatcaattcctgcattatttaaaaaaattagtaatggtgtctatactttaccacatgatttatcacctggtgcaaaaaatttattaactagaatgttagtcgttaatccacttaatcgtataacagttcatgaaattatggatgatgaatggtttaaagttgatttgcctgattatttaaaatgttctgcatttaatgaaactaaaactttaacaactgatgatattgatgatgatgttatttttgctcttacaagtgcaatgggttatagtagagaagaaattattgaagcaattaaaattggtaaaacttcagagactgaagaaattttagatagttatgaacttatgactaaaaatactggtttagttaaatcaatgaaaaaggaaagacttgagaatgaggcaatacaaggaatatcacaagaacaaatacaattacaacaacaacaacaacaacagcgtgaacaacaattaatgcaacagcaattacagcaacaacaacagcaacaacatcaatctgatagtgaatggcgatctccaactggtattgaaggtcaacaacagacaatgaatatatcaccaaattcaactattgcaatcttaccatcttcattaccacaaattcataaagcttatatgattcaatcatatcctgaacttgctaatgttcaacctgtaactgctaaaaaatctaaaactagatggcattttggtattagatcaagatcatatccacttgatgttatgggagaaatttatcgtgcattaagaaatcttggggcagaatggcaaagaccatcagaggaagaattatggacaattaaggtaaggtggagatattcacctggagataaacaagaatctgaaaaaatgaatgataatatacctgatatgatgaaaatgcaaattcaattatttcaacttgaaccaaataattatcttgttgattttaaatttgatggttgggaaagtaaaaatcaatcagtttcaggttcatcggagtctcatagtagttccgatgaagaattagtttcgtctttcagtgcttatcctttcttacatttatctacacgtttaatcatggaacttgctgtaaacagccaaaattagtttatatatcctatcctttactcttatatagttttatcatactttgtaaaataaccaccagaataagctcatgcaggtaagcttaaattagcaaaatcgaatcaattaacaaggcgagaaatcataagacaaaaaaaccctttaatttatcacaaacttaagatcggtgtttgcttgttaatatactttatattattgatagtgtaaacccattgacaaacacaatcaactctatttatcacaatgagtagaggaatttcagaagactacttctcaatgacgagaactaacagggatggtgcgttgagtccttattcatcaaatatgatgtccccaaatacacctggaggcggtttacatccaacactttcatggggtgaaacaccagagtttgcaggtttaacaaagactaaatcacatactggtaatacggttttcaaaagtgttaacttaggtaaagtacaaagagatactaaagtttatccatatcatactattcatttaacaactccacctccgaattatcttttacctgtatcaccagaagatttattagctaaaataactggtagatgtgttgaatgctcaaaccgtatgaatagcaaatgtacacatttaccatcacaatcatcagaattggattcatcatctttaaacaaacatattccattgatatctaaaaatagttttagtggtagtttatctgcaccttcaactgctaatagtataaataagaaaaagtcaattttatcaaaacgtggtaatgagaatgctcatattgaaagtcatttctctaatagtgttagttttgatacagttaatttaaaattctctgatgatttaaataattatccattatcttcattcagtgatagtggtgatgaagcagatattgataataatactgatgataatttatcaaataaagatagtcaagataatgattttgatgatagtcgtggtagatctaaaagcaaatcaaaaattctaaataatagacattcatcaaaatctccaagtagaagtttgagtccaagggctaatatgattttaccatctgatttagatatggtttctcaaaaacataatagtatgagacatttattttcattaaaatatccaacaagtccaattattacacatgatgcatgtactattactaagaaacataaattttttgatgatatgtatgcaggtagattaagatcattatcaccaaaacttaagaatagaaatataatgtgtcatgttagtggtaggaaacatacatgggttggtattgattgggcgtgtaatcaatttttagaagacggtgatacaattattatcgttgcagcaattaaaaatcctggtagatcattatcaagatatcaacgtagaaatagttcagatgttgcatatgtttcaaatattactgaaaataagataagaaattcaccagaatatgcacaaacagtttctgaaaatataatgaaatatgcactttcaataattaatcctgatagaattgttaaaattacggttgaacttgcaattggttcaacaagtgatgttttcaatgatatgtttgatttatatcaaccttcattaattataattggtactaaacctggtaaagtaccaccaactaaatcatgggcaactaagaggctaactgataggattgtggtgacatcacctgttccaacaattattatttcacctattaatatgggattatatgaaaataaattattcaaagttttagacaagagaatgaaatttatgaatagagataatcctaatacagtttatgaaaatgatgaattgttaagtgagttagataatattggtgtttatagtctagaggatcaacgtgaatatattaagaaaactgcagtgaatgacaaagttatcttgaatgaattaaattcagtaataaaagaaatgaaacatgtggaagaagagagtggttttagtagtaatattgatgatgatgatgatgatgaatcaaatgatgaggagagaagtgattatgaaccaagtatagactcatttgagtctaaatctttatcatcaagtaatgaatctaaacatctgaatgaggacaaatccaagaatttacaatatcctaaaataactattgagaaatccaatagtgatagatcagatgatgatattagtgttgattcatcaaatccacctccgttagttgttaacaataaatatactgatattactacaggcaatccgtcattcaagcttaagagactggaattacagacacagattgagatttataaagctgttgctaaattagaatctgagacattacatgaagattcattcaaacagttattaacagttatatcagattcggcacataaatatggtgttcaacttgcagaatcagctaaattaggtggtgaagaatcacaattagtacgaacactaacaggtgctccggaacaactacaacgtactaaaagtatggttagtgataaagttgaagaagatgattttaatgaaaaattgaagagatttagacaacagaaaaggctgaaacaacaacaggataaaataaataaaaataatattattgctggaaatagtagcaggaagtcagttccaaagattaatattgattcaccttcagttaatagttccgttggatcctcactgaaaaaatcgaaaagtccggtaatatcgatcagttcaggcagtatttccggaaataccggtattcatggaacactgagtggaagtgatagcaagagcagtagcagcagcagtaagaagaagaagaagaagttctttgggttgttttaaagctttaataatgttaactgtatttgtataatgtatagaaaatgattatgtaatatattctcaacaaaaattatttttcacgttcctgtactgatgacatgaaagtttaaagtgaagggtcaatattatgtagatggccattgaattgtagtttatatacggattgagggcgtttgttagttattaagatacaattcatagaatcagactatggatacttttgggaatcgattatgggatacttggtcaagacaaattggtacctctagtgataaacaaaatgatgattcaaggggacagggagatttgagtagattacggatacagaagggtaaatcaaaatcatctgaatctgagagtgatttacttggtacattcattacaaaatcaattgaaatgaaaaactctatctcagagggaggatatctaggcaataatactaataatactactaataataataatgacaataaagagggagaatctaatagctcacctacaacaaatacttatgttgataaatttatggaaaaaattatatcaatggcaattccaacaactactacatcaagtaagaaagaattgaatagagttcttgaaagaattgaaattcaaaaaaatagaccttcattaagtatgcaaataatgtcaagaaattcaatattattattacagagattaactataccatttgaaacaattgatatgattacaaatataatcaattgggaatctccactgataacaataacggttttactgtttattacaatcacaattttaaaaccaattaatctgattacaattccattattttatacatgttttgaaataataataccggcatatatgatacaaaatccaaatattgatgaaagtgtgaaaagttgggaaaatgaattacccaaacctgttaatgaattttcaagggagtttttgttaaatgttaccgatttacaaaatagaatgatgttatatataaattcatgggatttcataaatgcttggtgttggaaattattttattttagggatgaattacttacttggtctatatttgttggtttattattcacaggtttgattattgaattatttggatcaaacgttattttttttatgttaccatatttgaaattattaatagttatactggtttgggtacttgtaatttcacttcatccgaaaaatagagagaaatttttgaaaagattttacagtgaagaagttagattgaagacagttactttattaaatcgttgtgaatcaaaattattaaaagatttagacttgaaaaatgatgaaatggaaatcagacaaattgagatatttgaattgcagtattttaatgaagatacgagatcatggcaatttgcatgtttctctaaagatatgtacccattaaatagtcatatcagattaaacaatttacctattacaggtactctaatactagatggtgttcaagcacctgaaggttggaaatttgttaataaagatttgagagtgaatagtcaaggaattgctgtaccaaatagtagtggtagtcatgatgattcaactaagaaacgtgaaaataataataatgatcatcatcatcaacataatagttcgaataataccaagagactaatatttgatcatgagaaaaataaattgaataaacaaaagagaaaatatgaaaagatgataaaaaagaaggagaagaaagcagctgcgatgaatgaaagttataaagatacaagtaaaaattcgagtattcaaagaagaagagagagtaatgattttaataatattttacttgatcctataactattaataaaggtatacttgaaaaacttgaaactggtattaatcatgaagggtggtatttagatatgtgtccaactgattgggtgaataataattatttatatgatgtatttgatattgatgaagaaagtaaatgggtttatgatttaatagtaatgggtaatggagctgaagcatattctgcaggattaggtgcatcgaataaactaaagaaaagtcgaggagatgttcgtcgtcgtagatgggttagatatgctgttagagaaattataagtgataaagctgatgaaattaatgaaattaatgcaggaaatgttggagttgaaagtgattatagtttagagagtgaagaaactgaagaaagtgagagtgattcaagtaatttgaatgcattagatgaggaagatactacagaagatgatgaaagtgtggtaatagatgatgatgatgattataatgataatgatgaatcagatgaagaagaaggagataccactatacgaaatgaatcttttgtggatacaatgcatgtacaactgtgatattataataataatataataataaaccaaagataagaacagggtccttccgaaaatgatcaatttcgggcctgaaataaaagtttcaatttttctcaacatgacgactgactcttccaatgaaatatttccaactcgacaatgttgaagtgtttctatataccttttgtaaatacctctttttataaataacgaaattaatgtctactaaaaagacagatccttctaaatcctttattgcaggtggtgttgcaggagctgtggaaggtgtaattacctatccatttgaatttgctaaaactagattacaattagttgataaaagttcaacaatgtcacgtaatccattagttttaatttatacagttgcacgtactcaaggtataagttccttatatgttggatgtccagcatttgttgttggtaatacagcaaaagcatctgttagatttttaggatttgatgcaattaaaagaattttatctgatagagatggtaaattatcaggtccaagaggtgtaattgcaggtttaggtgctggtttacttgaaagtattttagcagttacacctgctgaagcaattaaaactgctaaaattgatgataaacaatcattaaaaccaaaatatcaagatggtacaaaaggtacatttagattaattaaagatttaggatttaaaggattatatgcaggtttattaccagttgcaatgagacaaggtgcaaattctgcagttagattaggttcatatagtaaaattaaaggtattttacaagattggagtaatactccaagagataaaccattaagtagtggacttacatttttacttggtgcatttgcaggtattataacagtttatacaacaatgccaattgatacagttaaaactcgtatgcaagcattagattcaaataaacaatataatagtacaattgattgttttattaaaatttttaaaaatgaaggtttaatgacattttggaaaggtgcaactccacgtttaggacgattaattttaagtggtggtattgttttcacaatttatgaaaaaatgttaactattatgggttagttagttatagtttttataatattatgttattaattactttatccctttaaaaaaaactttataaacaaaaattgaatagtaaattagaaaaaattgttcatgaaataatacataatgataataataataatcattaatccacatcttcatcacttgtttcatgaaaacgatcctcatcatcatgactttcatccgcttcttccccctctcctgcttcttcttcttcataaattggtaccagtccaaaatctcccattggtatacttgcaacatttgcctcttcatcatttctatttgaatttggaccagtatttgggaacattatagaatattctaaacgtttaacttttataaaatcataaattgcctttataattatgaaaactcctaatgcaaataatgaatatgctaataatggtgttccatgaccaatattacctgaatttgaagattgatggaaatcagggtgactacttaaagatgattgataattatccattgtagcatctaaatcatcattcataattgaaacatcaataaatgcaggatctaaaggttcaaatctattatctgatgaatcgatttcagttttattaatatcaattggtaaagcagagaatgctaaatttataattgttacacctaaacctaattgagcaccatttttagcagcatgagatgtatgtaaaagataagttataataaaacctaaaaattgaaataaaacgcaaatcattgtactccaaaggaaattaaatatattaccaacgggtataccatcaatataaatttcatcaaattctgacattactgaagtttcccaatatggaggtgaaggatcatatgaagcttcattataagaaggtaaaacatcaggtgctgacggtggcgcagttgaaggcttggcagataaattgctgaaaacaccatcattacctgcaccaacatagacaacatgaccattcattgtccttacacgtgaaggatctgttgatgtattattatttgatgataaagatgatggtgatgatgatgaattatcattagtttcagttggtaaacgattgtatctactattactatttatgtaacgcagtaatggagcatttgtgtaaatattattaacagatgttctaagcgattgtaatgagtttgatagagtgctagagacagcaccagagacgttttcgggtatcattaaagtccaatagagctagctgtgtaaagaaacagaagaagaagaagaagaagatatacaaaatgaaacaaacaaattaacggaaataaaataaaataaaataaaatacgagggattttagttatgtaagaaattaataagcacttattatggtattattattatggtatttatacaggtatattatacatagatcaacgccaggtgaaatgtattttaataggtaatgcattatcagcttccttatcaatggatgcaacagatgcaagtgtatcacctctcatacgtctctttaaaattgattctaaccaacgacgagttttcctttgatttcttcttaaacgtgcttgtttaacttggaaatttgaatttttattaaatgattctaataattgattatgtggtattgtaatatcaattggtgtatcaatatattcatttgaatattctaatccaaaatcatctttatttgttgttataacatcacctggataaataccttgaattggagttctaagagttttaggcattgttgctaaatcaggtaaaacaaatccaccacgacgtccagttgaacgtggagctgaacgatgtttacgttttgattcacgttcacgttcatgaataattcttgttatattagttgcagataattcttgtaatgaaggtgtaaaatctggtaataaatatcttggcataattatattacctgcatctaaatttgatctaataaattcttttaaatcttcactaacaattgcacctccatcaaatttatatccaattaaatataatgatttaaaatatatttgacattgttctctaattgaatgtgatatagcagttgcaaattctcctgataatgaaaattcttcacataaaattttagcaaattcttctggatcattttcatcattcattatatcccaatcaaatctatcagttaaatgattattaccaacagttatatctaatgtaattgggaatctcaaatcaatatttggattatcaattttaggttgtaattgttgaatttgttcattaattgaatttaaaattttatttttaatattaacaatatttttagtaattttataatcataaattaatgaatcaataaattctaataaataactttcatcttcattaatattccaaacaaatgtatcatttaatttaaaaccatctctatcaacatcaaattctaatctaattggtacatattgacaatcaattggtgcatcaattgaattatcaggtaattgtttaattttattttcatttggcattataaatgttactctaccatttgtaaatccatttccataaccattataaccttccccccacattctattagttaattcatttgcagtgggtggtaatttcattgattgcatacgagaatttttaacattttgataaaattttaaatcattaacaattttattcattatatgattattaacattttcattattattattattattattattattattactattattattatttattaaactattggaatataatttatcctttttaaccattgattcaaaaatttttgtatctaatggtgtattagttgacaatgctttcttttgcaaaccttttttcatcaaaggtttatgcggtatcaaattctttgggaactctgtagttggttgttgattatccattgtctgtgtgtctataagaagacttgtataaaaactaccataataaacctgcatgtaaagagaagttatttaaatttattattattaacattttaataaaatatacaagattacgtaatctgcctaattaatatcaatatcgttctctgcatcctccagttcctctacataaagcacatcttcatcatcttcgtcatctatgtctccattaccagtagtatagagccttcctaattgtgcctttgtagatacaacatttaatcttgccctcatttcaacaagtttctctaaattacgtgctcttgcagtcattgaacgatgtaatgcaataattgaacttgtctgtgctccacctccatgtaatgctaaaacccaacgaacccatgttgtaattgattcaataccacctccactacgtccacttaattctcctaatgcttgtaataatcctgatgctgcaggtccatctaatcctgaaactgtagctttgataatattttcatcattggtttcattaagaattttagataatgctgacatatcacgtcctctaattgattgtaaaacacttgtagttaatgtacctgcaattttagtattaccccttaatttattgttattattattattgttactattatttttattattattatttttaacttcagatataacagatttagctcttgcaacaatcgtaccaaaatcatctgcatcatcatcttcgtcttcatcatcttcatcattatcttttctatcatgggtaataattacattaccatcaaccaattcaccattattttcaaatgatggtaatgcagcatcatcaattgattgaaatccatttctaatatttttatcaatatttaaatctggattaatttcaaaatcttcaatacctgttcttgtaataataaaactacgttttgatgttaaataaccaatacttaatgttttagaatcattaacataaacatcttcaataatattcccattacctttgatcttaattatattattacatctgatatttaatttatttgatgaacgacgttgctttttattattttgattgttgctactattgttaatatcatttataatgaaattctcaacaatacctgcctctgtaatacctgaaacaactgaattatttacatttaatttcaaaacatcactatcaaatgttaaaattttaataattttccaactttcactattactattattatcaattatattaacaaatctttcattatttgaactaacaattattttattatttccaattataatattattaattaaattaatcgaaattgaaatttcattagtaattaattcattgattaaatcatatttatataattttgtaccacctaaaataattgtaaattcatcaatccaattaaagcaattgattttttcatcgattaaattaattttatattcttctactttctttaattcattattaatatcatatttaataatatttaaatcagaatcaataattgtaaagaaatcacttttattattgaaattatttttacaaccataagtaataacacttttattatgttcaatttctaatcttttaattaaatcaccatcatcaatatttaaaacatcaaaatatcgtttaccattataaataatagcaattttatgagaatttaaccaaattaattgattaattttaatattatcattttcaagtataacttccttgaattctggatttttaccgaaaatttgatattgaactttaattccattaattgatgtacttgcatatgctacacctattggttggttattcttaccaactaaaaatgatgatggtactaatacacttgacatggttgtttgtctaaaagaaattttacttgatctttcaatgaaaaaaaaaattcatgttgaaaaataaaataaaataaaataaaatttttttaatatgcttaccatatccatccgtaatccttacatgcaatgaacgttaatgtttgttgttataatcatttttactgatctttattatacaataactaacaatatataccccctctattatgtctgaagaagatctttcacttccgagagctacagtgcaaaaaatattaacagaaatattaccaaatgatgtatcatttacaaaagaagctcgtgaagcattaattgattgttgtataagttttataatgattgttgcaactgaatctaatgatattgcagagaatgatttaaagaagacaatttcaactgatcatattgttcaagcagttgaaaatttaggttataaaaactatgtttccatcttagaggaatttgttaaaagttgtcgtgataatgcaaagataaaggaaaaacgtaaagaaagtaaatttgttaaatcaggtttaacagaggaagaattattagcaaaacaacaggaattgtttaaagctagtagagatagattgaataaataaatgaataaataaataacttatatacttacaatgtttatattatatcccctttactaattctaaaatatcaattgtatcaattaatgatttccaatatttatcatcctctccattattgtagttttcaattgtatcacttaattctgaatataattgtttaattaattccattatagtttcaattgggttaattttatatagtccaattaatccaactaatccaatctttaaatcatataatgattcattccattcattattattgattaaattttgtaaattattaattaaattgtttatttcattattaattaattttaatgttatattggattttttataaattccaattaaaattagttcaatattaattttcttaaacaaaaagtcttcatcatctgattgattattataaataaattctaaaaattgttcaaattcataatcatcacattcattcgataaaattttttcaattattaattcaattagaaatttttgaaattcttcatcattagaattctcattaataatccatttaattaataaattcatttgttctttatcatttttatcaccaaaataataaatattatgtaaataattttcataaaattcataatattcccatccatattgttcgaaactttcaataattgttgataaattgtaaactttcctacatttattattaatttcatcacaaatttcaagtataatttctaaataatctaatgatgcattctctaaaattccttcaatcaatgactttagtttatcatttataactgaaattattgattcatcattgattgatattataattgttaaaatattatttaaaattcccaataatttattgataatttcattatcttgttcaatatcagtattatttattatttgtaaaaacatatcatttaaattacaaattaattcataactatatggacctaattcatcaatatatctttcaattaataaatcaattaaatcatttataatttctaaattttcattttcattaaattttagtaatatttgcattatttgaattggattaattaaatcttgttgctttatctgttcattgtatagaagtatcattcttatactaataattattaatgatttcgatactatgtcatttttttcattatcattattgtaatttaaatcaatattaaaattattaaaattaacattaattcctttaatctctgtgaaaaaattataaattatacatctaacccataatagatcattcctattattgattgaagaattaatttcaattattttatttattaattgaatttcaacatcagtatttttgattttggaccaaaacatatttaagattttcagtccacaaacaatataataaaagttattacttgaattaattaacttttcacataattcaattaatggatttattatatttaaatcattagttattaaagtatttaaaaatcttttcgatgaatcatttaaatcaattgaaatttcataggtataattattataatcatttgtaacataattcataaaatcatttatattatcattaatatcatcaattaattcatcatttggtaaattaattgaaactattaaatttgagattataatatcaatataaggttgaatgagagaatataaacctaatttgattgatttttgtaaataattaaagaaataataaccaaatctacaatttttctctaatgtccataagttgaaatcattttcgttatcgaggtattttaaagtatttgacaagttttgaattttaatattttcatcaattagttgattatttgataaattgatgaaaatttttaaaatccatttatttaatcttaaatcatttaaattattattaatttgaccaatttgaccaattgtttcacatatcaattttaaattctctaaatcattaaagtagttaaacattgtgaaagattttgaatcacttaaattatttaaaattttcattataatataagttattttattaaatttgatatcgttagattgataattttgtaaaaagttggatagtaaaggtgtaaatgatgaaatttcattcaataattgaatattaactgaattttccataaatctatttgattttgttaaaacataaattaataaaataattatgtaaaattttgacagagagttgtgaatttcattatcatttaaattatcattaatgattttaattaaattgtattgaaattgaatattttgaatatttattaaattttctaatattttgataatcattttaattaaaatttgatcattaccaacaaaagggtttgaattttggaaagataagaaataattgattaaattttcacataatgaattgatgttagcggtgtttgatttattgatattgtttttaatataagttaaaataattagttgtaaatcactttcaatgttactattattattgactaaaattttagataatttttcaattacagagtcattattcagggatagagaagataaagaaacttcagcctgtctccttataatattatcctttgataaagtttgagaaagaagtagcaacaatgaatcatcatccataatgtataatgtaaaagtgcgacggctcagaaacagtaattaaattataggccccttatataattaataataatagttaacagtaaattaatataaggacactaacaaagtggcaaattttcactaagtaataataatattattatagtgagtgttgataatatttgattatgtaagtgttgattatgtaatcatttcctaacatgctttaattgcattaatgttgctcttgtattatggagattcaatatcataaataaatgactgaagaatgctcaattgatcacggaattgctattcaagtacttgatcatttaaacatcaaaaaatcaagcttgtactaaagataaagtaaaaattgatggtgaatttaattaaatgaacctactatggtttttcagtgttagtaagaacaaaatggtaaaaaaaaggtaccaaattgtttgcaataaatagtagtgattatctaagtagttaattgatgttattaagtggttgaacgttgatcatagaaagaaatcaaagatattaaggaatcaaaagaagaagaaaaagtgggaaattaagatgagccgtcaagttcccttggctaattttttgacatgaattttcaggctgcttttacattctacacatgaaatttatacttatacttaatttttcaatacataaatctcttacacactaaagatttattgaatcctaagtaaagggaactccgccacttatccatttaacaggttatgactaataatgagattattaacacctgatccaatgcacactgttgttttacgaaaacatttttactgtgatataatttttctcttaagtaatatacagataaataagtaatctatctaatctctatttaaaagtatagcagattggacttaacaccaaaacttgtaaactctgacaaaccatggtttagctgctaattgtgccttttcttctgcaatttctgctcttaaaacatctaaatctttaactgtacgtcctgtatcaatatcaattgttttaacatctctgaaaaatttataatctttggcatagaaaatccaaaaaacatagaaaacaactaaaattggaacacaaaggaatgtttcaaaaaaatcttctgcacttgctggtgatcctaatgggaataatgcaacccaaaattgtgctgctaaaataagacaattgagaataactccaaaatatgatccaataactccacattgtgacataaatggtaattcatctgtacttctaccctgtgcaactaatgctcttctgaaaataatatgacatgcacaaattgatccccaattgaataatgctgataatcctgataatgatagcatccaatcaaaaatttcatcttgttttggagttgcagctaaataacataataatcctaataataatgaaatgccaacaccgactaatggtctaccctctctatcaacatatccaaaccattgtggcccatagccttgatctgcaattgatgcaattgatcttgatgatgcataaacacatgaattggcaactgaacaaatagcaatcataataacaacattcataattgatggcaatcccttgatacctgcgttttgaattgaaataacaaatggtgatgctgctgcacctgaattattaagtaatctttcatcattatatggaacattgacaccaattaatgtaagtgaaataatgtaaaataatgtgattctccagaaaacttgcttggttgcagatggtaatgattttcttggattttcggtttcagctgctgctaaaccgcataattctgtaccactaaatgaaaatgctgctgtaacgaaaacactacaaacacctttaaatccattactaaaagcacctggattgtgccaatatttacctccgatatatccaccttgtgggccaccaccacaattaattacaataccaagtataatataaccgatgattgtaataactttaataattgaaaagaaaaattctgcttcaccataacctttaacaccaaataaattaattataacaataaggaaaaagaaaattgcaacccaagcagctgaattaactgtatcattccaataatcaattgtaattgcagctgcaactaattctaatggtaatgtaactaaccaaccaagtgcataattccatgtcatacaaaacccccatgaaggtgaaataaatcttgtattatattgattgaatgaacctgcaactgggaacgcaacacataattcacccaaagattgaactgtgcaaaacatcataatacctactaatatccatgcaataataagtgacgctggaccaccatctgataatgcaccccaacgaataaaccagtaccaatagaaccgccaattgcaatcatttgtaaatgtctattctttagatttctctttaatggagttgtctctaataatcttttactacgttcttcaattgttaaattttcatcaactttccatccttctgccggtttaaaaccatttataaaattttggaaatatccttcattaactttttcagtattatcatatggatcgtatgtaggtgttgatgaaatttcattatcatcaattgtttcaatcgatgtagttgctaaatttttctccctatcaaatcccaatgacatattttttttcacttttattctcaaaatcaagatcaagttattatctaaagttcttgttcttgcctattcaaaactctaaaataaaacaaatatcatagtaaatgtagtatataactcatcttcagttaatttggattaaggagatgtatttattcaactaaattattgttgcggggatgcaattgcgttatcagtttagttatgatctgtagctatcaaagataatagattattctacagatcaaaatgaacatctcgcctgaaaaatttcaaaaattactgaaaagggtgaaaaaatggtgtcaaagcgcatataatattatccgacacagtgttgacatgaattctataatctctgagattaagtagttgctatgacattgtatacggctccaacaaatgttatactactactattcatactataaatatagtactgttatcagagcgttatctaattgataaaatttcttatcgccttatcattccgtatttgacaatagcaagatacttttccgcgtatcctgctactatacgtcattaagattgaccaacttcttattgttggcgagtaagggttgggtttatctatttaataacaatagtttaatagctgaataggttaatcaattaatgattaactgattaacttattgagagataagaaattctaaaattaaattgtatttataattataatacaaaaaatgagaaattgttctattctaaagaaatattctgttgatttaacaccagaacttataaagtctaaaataccatggtttagctgctaattgtgtcttctcctctgcaatttcagctcttaaaacatcaagatcttgaatcaatctacctgagtcaatatcaatatctttacaattttggaaaaatctaaaatcttttgagtaaaccaaccagaaaacgtaaaacataattaatataacaacacataaataaactttgaaaaatgattctgcacttgctggtgatcctaatgggaataatgcaacccaaaattgtgctactaaaataagacaattaagaatgacaccaaatgctgatccgtagacaccacattgtgatgtaaatggtaactcatctgtacttctaccttgtgcctttaatgcagctctaaatcttaaatgacaagcacaaattgatccccaggtgaaaattgatgataaaccagaaattgctaacatccaatcgaaaacttctccatgttttggagttgcagctaaataacataataatcctaataataatgaaatgccaacaccgactaatggtctaccttctctatcaacataaccaaaaactcttggagcaaaaccttgatttgcaattgatgcaattgttcttgatgatgcataaacacatgaatttgcaactgaacagatagcaatcataataactgcattcataactgatggtaatcccttgatacctgcgtttctaatagaaataacaaatggagatgcagctgcaccagagttacctaataatcttgggtcggtatatggaacattaacaccaattaaagttaatgagataatatagaataatgtgattctccagaaaacttgcttggttgcagatggtaatgattttcttggattttcagtttcagctgctgctaaaccacataactcagtaccaccaaaagagaatgcagatgtcacaaagacactacaaacacccttaaatccgtgattgaatgcaccaggattatgccaaaattgacccccaatgtaaccaccttgtggaccaccaccacaattaattacaataccaagtataatataaccaataattgcaataactttaatgatagagaaaacaaattcagcttccccataacctttaacaccaaaaatgttaataactaaaataacaaagtaaaagatagaaacccaagcagctgaattaattgaatcattccaataatcaatagtaattgccgctgcaactaattccaatggtaaagtgactaaccaagaaagagcataattccatgacatgcaaaaaccccaagctggtgaaataaatcttgtgttgtattgaacaaatgaacctgcaactggaaatgcaacacataattcacctaatgcttgaacggtacaatacattgaaataccagttaaaatccaagcaataataagtgatgctggaccaccttgagccaatgcaccaccagtaccaacaaacaatccagtaccaattgatcctccaatagcaatcatttgtaaatgcctattctttaattttctttttagtggtgcaaactcttgaagtttgtgggtacgttcttcaaatgttagattttcatcaatctcccagcctttagaaggtttaaacccatcaataaaataaatgaaaaagtttttagtgtgtttatcttcaatataagggtgttgtgtagttgtaggagacgtatcatctgttgaatatgtatacgtagtagctatacttttttcctgatcctgaagttctaacatattggttgggggtagaagggaagacaactgtttgaataaacatgcattaagttcaagtttggtggttttataatcatttaatcgttagcagaacatgtataaaaaaggttgaacaggacagaataagaattaatacacaatcatcaatacaccacattttaatttggttttatcataatatgccaataatgggtactattatcctggatatcatgagtgatgctattaattattgatctataagttttgtgttttgtaagagtattattttgtctaaacataattattttttcttcttgtcaattatctcaaaacagcaaatttgtctttttaggtggctcgtcaagaataaaaacatttatttttatgctactttagaggctttgaagataaaaaaacctacagggtcctaccattggtactaatgatacatagttgttaatctttcgtcgtataaatacaatgaagtcactaatcatttagcagaacaaggaaaagcttataaggcatcacagacaaatctgtcataataatctgtcataactaattttttttttcgcttactaaaaactcgtagtgtataatattatgtaatcaagtatataaattaacttcgtttgttaaaaaaaaaaaaaaaaaaaaaaaaagcaatcatcaagtttaaagtgatgtaatgtaatatacagaatagaaagaagttaggctttatttagttgctcaaatataatgcatattctaaattattcatagatcatacatcgatgatctaatttagttcatggcaattcttgtcccgattggagcattgttttacgatttccaagctaagatatgtattcattgagcggaaagtagtgaattatagtaaaggacccttacttattatatgattattttatatcacaataactacaactgctgcctagagacatttactagtattttttttgaaaagattacttttctgttatgttacatactagatgtatccctcttaaaaatgatacgctataaaaatttactgttagttaacttaaatatgcttcaaccttaatagcattagtataatgtgcgttaagtttcgtatgtacaaattattataaagaagataataataactgttctttttatgaaaagaaattcacatcacttgattccttcttttaattcattttccaaactatttatcctctttatccatttgagcctttagtgcttgcattaaaaatccaacatcttccttatttaaattaatattttcctctttcataatctcagataatttaaccatttcatcacgaacttctttattacttaataattgtaattgttgcattaatgaaggtggtgaaccacttgaaacatccattttacttgcaattactaattgaacactctttaattgttgatgtattcttgtattattacgaattttttcttgaaattctgctaatctttgtaaacgttgtgcatttggatcctctgatgctaatctaacagatgcactagtgaaatttctgttggaaacaaaactcttcttaactgattgtttaataattctttgtagcattatctatatgaaatgaatcactaataaaatttcaaactcataatcctaataataataaaccctgatgtcgtcaatagaaattgaagatggaaagttccggaatttagaaaaaaattttgagtacgtcagcggatttataaaattttcaccgaatccgacactgcagactttgtcaccgcgggaacccttctttttcaggattgtgcagtttttggagagcatgtgcagaatgtttatgcagaaccactgaaatcagccattttttgcaatcgataatttaaaattgtaataaggtatcactatatgctatatattttgtataataaatgaaaaaaataaacaaataatttaataatttaataaataaatgaataaatgaataaaagaaggtttgggtgattaagtacaattacttaatcacttgatcatgcttggcaaaaaccatcttgatgatcatcaacagagacaatccaatttgaccaatcttccttaacatatgctccacttggtgtaatcattgacatttctaaagcagaatcaccataccaattaactaaaacaactctaataggataataattaccttcaattaaatgaacataacctttagtttgttcttgacaatgctcaaagaataaagcactatttttactatcaattggaatattatctggttcacaacatgcaaatgcatcatttgtaccaatccagaccattgaaccatcatctgaataatccattgaaaattcataaagaccagtttcttgtgcataaatataaccagttaattgtgcaacataacctttccatgaatctaatttttcaccataaattgtatcagtaacacctaagaatgcatgaacagagaaatttggtgctgtaatactctttgcagtaccaagtgttacttcagttgtatattcatttgcataataagttgattctaagaatccaaaacccccatcatatttataaagggtagcatggaaacctggatattttttcattaagttatcatttaatgaacaaccggttgcttgaggaattgttttaccagtattagtgacagtaacagcttttgcgttagtggttggtaattgttcaacaggagcagatgattgatcaataacaacagcaacaggagtttgaacaccatcaacattactaaaagcagtcatagtcgaagtagtagcaaatgtattaactaaggtggtagtaatagttgattgtggttcgttaacatataagttttcaattaaataagtttgaccattaacaacagattgttgataattagtggaacctgaactatatttagcatcatattgaacattggttgaagtcttaacaatttggtcaccataatgttgagagatacaaacttctaattgatctttatcaaaattgataatagtatcttcaaaattgttgataatatcaccacttggagtaataatttcaaaatcaaatttagaaccaaaataaatattaatataagttgttctcattggatataaagtaccttcttcaagataaacataagaagaatgagaacctgcacctctaagagcaattaaaacatcatcataagagtttggaactaattgttgggagcaaccatcaaacgcaccattacctaaccaaataaaagcaccatcattaacatcaccaattctgacattataaagaccagtttccggtgcaacaaaataaccttgtaattcaagcataacattatacatattaatattatacattgaataaatgtgttgaccatggaaattattatcaaaatcaaaagctggttcagtaacaccattagttgaagttcttggaatttgaagagcataatcatttgcaacccaattatcatcaaagaatctaattaaatcagcttgtggataatcaaagaatcttgcattaaaacctttagaatatgatggaacaccagcaacaatacctgcaccattagcagttgttgaataaatatctttatttgcatcagcttgacctaataaggcaattgcaacactagcgagtgtaagtatgtttgaaaacatttagttgggaatgtgtttagcaattgattgttgacaaattaaaataatttaaattccggaataaaatcataataatatgggaagtctttttcatttaaatagttaggttaatagacaaacatcaaatgaccctttgtttacaaataaaataaaaagtaaacaacacgattagctttatgtttcaatataatagcatataataattttattcaaacctaatattcaatgtaacatgactatctataaaatatggatctaaagctatttctcctcaaagtttaaattattggaaaacaaatagtaacaaacaaactagttactaaaaaccctggttcctgaataaccgtcaacaaacatcctatggctttatacattacaagacgctttattagtataaaattttataaatttgaaattaaaacacggttaccttcaaactttaaaattgagaaagatatttaataaagattcaagaaagtttaagaaaaattaagaagaattcggtataaagtaattaaatacctactacattgggaaacgcgttccgttcaaatctgagagtttatcttgatcttaatcgtctattaaatagatattcagatccaggaaattttgtgcaagtcatttattcagtattttagtaaatataccatatatagcaattattctaatgagaacatctgcaaacatggaaaatctcttgtaactatagaggaaatatgcaaagaagtggtaaaataccaaaaaactctgggcaataatagcaaaacggcaaaatggtctgacagaacgggcagtagaaaaaaatgtgagattcggttagttggtaaaaatactgtcattttaactatatttccggcaaagtttttaattatattttaattacgtctctctaacaataaaatattaaaaatgaatgtgccgtaatgttatttaagaaaactaatgaaataaaagaaaagtttaataatacgagatttactttattggggtcatcgatttgacattatatacgttactctattaaaattaaagttttaacctaaactttaaatcctgcaaccaaactaaattgaaaactctagattttaaagagtttagtatgcacataaagaggggttttatgagccctaatttagtagattactttgtatagtatattagtttatgatcaaacataaatagatagtaacaaattcttacaactttgactgttgtgaaacagtaaatatactatataataatgttttttgaaactgttagtttcaaagctcctgaaaataatttgcagttagaaaagtttttacaaaacggtaaaaaatattgacttaaaaaaaggtataagataaagatgtatcatttatataaaattaactttacttgaacatagtatatcatcaacaaccaatttcatggttaatcaggcacaaaccaactgggatttctgttaaaataatatattctaacctaatactcaattgtggagtgatcgatggttttttattccaaattgtaccttgtacctaccttttgaaagcagttttttggttaaatttcaattaaacttgtagttttcttccaagtacccatttgtgccttaggaaagtttattgatttaaaaaatattgcatttagttgaacattttgttaaaattatcatctgatattatctgatattatctagtatattatctaataaattatgtgatagtgattttaaaatacctatcattatacgctatgtattaatgtctaaatcatggggtagaaagccactcttacaggcgtaaatttgtcattaactaatgaaacattgaagaattgtcatatattaattaacggaatttagggtaacttgataggctattaaaatgaaaagacaccccctaaacgaatattaccgaaatctgtaatttgaggcatataaaaattttgatgcctattttgatgccctagataatagatagtataaggtcgtaattatcatcaataataccaatatattgatagaaaatataagttcttataagttcttatctttttaataatgacctcaataaattttacttaataatatcacaactggaaatattatacagtataaaaatttaatcttaattaataccccttagagtaattaattctttttattatcttagtaccgaaataaagaattaaatattctaacaaagatatataagatgtattgtaaaatctagagtaagacattatattcattattatatatggtgaatttagtagttttgatggaattaatgctgtcaaagcaaatcaataagatataattagtaattgccttagggcagatttcccatagtaatttaacgagtaatgatgacatattcccgataattacatcaattctattaatgtatattgagttaactcaagatatagtatgccattggaagctcttttgcatagacaatacaaactctttcaatatgctcccatattaaataatgcctatcactcttcgggaggatcgcaaaaaatagtgacccctccttccagattctgaccttttgaatgggcttcaaatggcaattctttaagtggaaatagtgctgtttcgttccagggggagggttgagtagattgagagtactattattgtaaacggtatttcatagtgtggtataatgataattatagactatgtagcggtaataaataataatagaaatggtggtaataatggacccggaggcattaggatttagaaaaaaaatagactttaatatgtccgtgcatatgaaaatagtgttagtagatcttactcttattttattttttaagttgtaaagtctttttgatgattttctagctttaatagttcttacgaaaacttgactctaaatatattgccatgtaactttattgttgtcttgagaatgtatatttgcgtaaagtaaaacattctcgcaaattataaacaatacattgccacattatatctttaccttgaacatagtaacttatataccccataacatccctcttttattctttactcatctttctttctttattatttcctattcttttttaaatacttcactcaaaaattatccaattctttatagcttttttccattctgtttttctttagctatcaatttttccgttctattttttattagctatcaatttttacaatttatatctaatatctgtacattacaaaactcaagttagattaaattagatcaaattagattagatacaataagattatatcatctatcttttttatcttttatacctctttcttttactttcttttaaaaaattaatactcataataatgccaggtatagtttactcatcaaatttatctcatttaattaatccaatgaacattaactacaatgatgcaagaaatatcaataataacttaaataataatacttataatattaacaatactaacaatgttaataatagcaatggtattaatgactcaagtccaaatacttcacaattagagtataaaattcaatcaaataaaaatattgtaccaatgacatcatcaaactcttattcaaatacttttaattctccaaaatcagatattctcagttcaactgataatcaaatactcaatcataatcaccataaccataactatccagctaattatagttcaaatactaattcaatgtcaataccaataccaatgccaataacccaaaatttcataccaaactatagtcaaaatccaaattcaaatcaaaatcaaattcaaagtcaaagtcaaagtcaaaatcaaagtcaaaatcaaaatttcaaaaatatttcaaatttcaatcaggtttcaaatctcccatatattcaaaacataaatcaaaatcccaaacttagttcatctataccatcaataaatcaaataccaagttacccaaattacccaaataataataatatcaatagcaatgtattatacaatccaatgaataatttatctcctcctgtaactgctaatatgaatcaatcatcacaatctcaattacaatctgaatcacagcaattacaacattcttatttaccatacgctatgcagccaaacattaatcattttaatagattcaatagttattcaatcccatgtaatataatgccaccttcaattatgtatcaacctcaacaataccaaatttatccatcacatcaatctattatgtcattcccatcatatgaaagcaatataagcaattcaacaaataatacgaatatttcaatgaattcgaataattctacttccacatcaatacctactttccccactggtggtaacactggcgataataatagagtagttgaatcaaatgatttatctaaattaaaaccaataccaggaattatggcttatagtcatccattaattccaattatcccatcagcatcaggtaacatacgtaagaatagctctaaatcattaattaaggaaatggaaagggaagaattaatgagaagaattaattttgagactacagaaattagtaccataagtacaaatactaataataacaatgaaagtgaagataaaggtgaaagaaagaataatgaagaagaagatgagaaaccacgtcgtatggctttcggatcaccaacatggactaaaaaggatgatcaattattaagatatttaaaggagaccgaaaaaattggatggagagatatttcaatgtatttcccaatgagaacaattaatgcatgccaattcagatggagaagattagttacaaaggatgaaaatagaaggaaacgtgaacaacgtaatttagaaattaaagaaagacttaagatgaatgatcttagtcaagttatagaacaacaaaaacagaaaaaaaacaaagagattagtgatagcaaaaagaagggtaatgacgataaaaaagctgataacatcgttgctaacaataccagttcaaacaaagaggaatcatataaagaggtagaagttgagagagaaaaggaaatggaaactaaaagaagaaaagtaacggtgaaagcacaatcacctgtacaatcatcaacgtcatcaccatcagctccatcatcttcaactacaccagttaaggatgctttacagatcaaaaaggcttgtggtgttgacaagatgcttgattagattcgattcgattcgattcgattcgatccgatcagatctgattatcgatgagatcaaacaatctcctcatcatcatttacttatatcccctataaacatttatagacactatatactatttattattatgtaccatagactagacaacataaaggtaatatactattcaaagaaagagagtaaaaggaagaagaaaggaagaaagaagcaaaaaagaaagaaagagaaaagaatccatgccgatcaacatgtagaatctcgttaacaatggttatagcctcacatggtgatgtcaaaatatacccgctaaagtcaccttcttcttaaattacaggtctatataagcatattattttctcttgtaaaggtattacagtgatcttagaaggttacattgatctatgttataaataaaaagctactaatcaattgattatacataatgtttaactaccctacagaatcatttgaaccattttgggggccaccaactgcaacaattgattggtgtgaagagaattatttatttaccccctatattgcagaagttattaatgcatttacaaatgtttttttcgttttattagctttacatcacatttattcaacttttaagaataatcatggtgttttatatattttcatatcaattggatttgcaagtgttggaattggtagttttatgtttcattcaacacttcattatgaacatcaattaatggatgaattaccaatggtttgggtaactgcgattcctttcggttatatttggggttgggataaaccacaaccttggaattttatttggaattgtggtactttattattaacttcaattttcacttacacttatattttcatttatagaaatcctgcatttcatcaaattttttatgcagccttgaattttggagttatctataaatcaatcaagacaatgaatagagttatacctgataaagaaattcgtcatagacaattcaaactattaggattttcattctccctatttgcctttggattcttaatttggaatcttgataatgtttactgttcaaatttaatatcttggagaagaaattaccttggatggccttttggaataatacttgaaggtcatggttggtggcatatatttacaggtttaggaatttattatttcattatttacaacatgattaattcagtttatatgagaggtgaaggtaataaatacactataaaaagatttggattcttagttgaagttcaaaaaattaaagataaaaagttaaattaaaatcctataaaatttacttttcataatacttagtgtattgaatattattctctaatattttccatgttggattcccattcttttgcatttgttcattagcatcgttaaatactgaaatcattgtatcaaatgattttttaaaccattcttcagttctatatttacttacataaaatccaaatatcttactcaattcaactaaatatatcatttgtaatggcattctaccctcaattgaaccttttagtaatttttcagattcctctaatgtattttgtaaaaccgtcttcacttcatcatcttcggaatctttatgtgtgtataaatattgaaagtaaacttgattcagtataattttgaattcatgtgggaaactctcatattcattacttagtttgatatcagttaaaaagccattgattaattccttattccttgtatcttcaattgatcctaatattttacccaagaatgtcatttggaggattaccaaattgacattgatttgtaatgtggttgtagtgataagtttagataatgcattcaaataattttctaaagtggttctttgaatagattttatacaagttaaaggaatcttgtttaataatgcaatactttgtaattcccatggaagtttcaaagttaaatttgggtaaactgtatgaaaataatattctatcaaattgttaattgaaacactctccacaaatctcttcatatcattctcatttctaatttgatttgataatagaagtaataatgcaggtaaatgttcttgatgttttattctagttgtttttggatcaaatattatatcaattaattctttgtaaaattcttctgaatctatattcatttcaaatactacattcaataatacttgttcatcattcatacttttcaattgacaaaataattccttgaatatcgtcaatttttcagtattatccaaactttcacatgttaaagaagtagaatattgtaataatacgctgtcaaccatttcacaaacttcatcatcaccagttgatctgatttcttttaggattttcttcatttctaaaaattttctaatttcaacttgactaataattgaatgtatatcttgtaaaatttccacaattaaactatcatcaacagtttcagaatcaatcttcaaaagagcttcaaatattactaaacaatgatctttttcaaacatctctttgtttgttgttaacatattattaatcaaaatcaattgaacttgcatgaaaaactttttatcatcgtcagtttcaacacctatcgcaacaggtaaaatatctttaatcaattcatagacaaatttagcattttcaacaacatcagcaacataattgactaatattttcattaataatgaacagaatttgtaatctctttcatcaagcttatttttcaattgtgaaataacatcttcaatcttttcctttgggaaattcaatctaacttcttcatttctaagtgaaacagataaatcatccaactccttagtggtatattcaggcatgtagaatccaattgggaacaaaatgtacaaagtgtaagaaaattaataaaatttcatgtcacattgaatttcaaaaatgcacacacgttaaagcgtttaatgtcatttaattgaaattgatttatacatttaaagttacaaactaatacacaaaattataaattaatttctaaaacgtacttcacgataccaaccttcacctatatcttcacctctagtaccaatttctctatcaatatggccatcaatattagcatcatttaaccaataatgatttgatagaccagctgcatccatacgatattttggatcaagtactaacataccttttaaaaaatctgcaatttgataagattcttcttcactaaatttatatttatctaataaaacactctctaatggccaaggttttaaattttgaatttttcttaaagttttaaaatctgaatggaaataatgtaatccataattactatatttaattaagtgtggcggtaaataacctaataattcaataatttgagctaaatgatcatcatttttaccaaatgttttaccctctgttggttcaaataaaaaatcacctgttaataattcaaatatcagacatccaactgaccaaatatcagctgaacaaccccattcgccacgtaaaataacttcaggtgatctatattgtctagtttgaatatcatgtgtaaaatgtttataaatccaacacgcattacctaaatctgctattttaacatttataatatcatcatccattaattcatctgcacttggtggtacataatcaaataaatttttctcattttcttcatgttgtgaaacaattgtttgaatatctttatatgacattctacttggtaaatccattgatgaaacaaatgaacttgaatatgagggaatactattagcactattaactttataatgtgggattgggattgtgataccatccttatttgaagtatcattatttgttgaattggtattcaaatttgtttcagtattttgttccatttgattatttgaagataatggtgagttaaagaatgagcttgatcttgatctaaatggtgatggtaatggttgtgaatcgcaaataacagaattagcacgggttttaccatatcttgtcttaccaaatgtaacatgttgtcttgccttagttagattagttaatgatttagtatcaatactaccactaccatttactaggtatttacttgaaattttctttaatatatgacgttcccattgagtttcttcaagataatttaataattgttcaacttgatgtataccaattaatatattttcaggtttaatatcagtatgaataataccacattttcgatgtaagaaatcgattgcaagtaaaatttccttagatatttgtttaacaaatttaatcggtaaacctttatgtttataccttctaattaatcctaataaactttcacctagtacttcaaaaacaatacaaatatgagtcccattctcaccttgatgatcaaaataatctaaaagcttgattagatattgatgaccaggatgatctttatcagttatattgattttactcaataattttatttcatcaattgcggtttctctatattctttagcactacgtacaactttcattgcaacatgaacattatttacagtatcctttgctaaccaaacagttgaaaaatgaccccatcctagctttcgtacaagaatatatctaccatctttataggtttcaccaatatatgcaggatgataacctccaagtttataatcttctggatcttcctctattgcttttttatccgaaccattttcattatcattatcatcttcatcatcatcgtcatcattttcaatcattgataaatcaataacatgcacatcattattatttgatatatttgaatctaatgatgatgcagatgatattggattctcttcaacaatatcatcaacatgtaattgaaatctagcactatgctcctctttttgtaaatgttgtagttgtgaaatttcttcagttacatcattagaatgtagattatctattaatttttgttgtaatagacttgatccaattccattacttggatgtttcccatcaatatgtacagctgtctcagacacgacaggaactgacgtaagtacagataatttctttcttttcaaagcatctccactttcattactacctacattatcatcattattatcattattatttatcaatgggaataaaggattcaattttctatcaactgcttcagttatttgattatcttgtattactgaagctattaaagtaggtgcattggttgcaattgaaggttgattttgaaatgcaactgataattgtgatgtttgtttaacaggttgtggtctaattggttttgattgttttgaatcaaaattaattggtgattgagaagaatcacgtttcccacctgcaccattagttgtacttcctgtcattaactttgtcgttgttttctatttgtcgatctgatctataattgcaaacaattgatgacttagatgacagattgtaaataatcgatgctaagaaaaatgattaagtggcggtaatgatgtaatactgcggctaggaaatttcaataacacttaatgttaacagccatttcttttaagttatatttatacttagttacacaaaagttagttaaatgattattttatagtcattaatggatgaggtctaactgagtccatgtatttgaaaatttctgggtaaggggaaagatcaacgcccgctccaacaacatcatcaaatgttttaacagtgaaaatatcactgataagaatttcatcacttgataagtattttgtagttttaattttcaattcattttcgataaatttcaaaaatcttgaaattctagtaatatgttcctccatagtcaaaccttcagggaaataaattaatggatataatgcaccaacaaaatcagaattcataaatgatagccattttaaattatttgctttttcttcctctgtgatacctaaaaattccttcttgtttgatttatcaacaatataggtaaaaattgcaatagtttcagttaatttataacctgaaggagtaatttaagccggtgctttgtttaatgggaaaatttccttataattagctgtttcttgctttaacttagtttcaatctttaatccaacataatcacctaaatcagataaccaattagatcttgaagatgttggataacagtatactgtagcgaatgtcattgtttggtttattaatatacagagatacctttataaattaatgaaattaccccagtacttatatagtcgaagaaagtctatatattgcatcttgatgtttgattactaattaataatcaccaaaaatagttttgatgaaaacggaaacaatagcatatgattattaatgattatgttatattactttattatattactttatttaccaaaaaacgttatgttaaatattaaatattatatatagcagattagacggaaatgtatgtagataattgttgtgataaataaaatatactccaataaaattatcaaatttatttcatttcagaatcaccatcagcatccttctttctatttgctgcaatctttgcaaaaatatcagcagctgcagcagcttccttctttgcacccttttgttgttttaattcagcttgtttagaattatatctacccttaattaaattaccaagagctgctaattcttcatatttagcaacatatttacccttagtagaatcataaccatcatcatataaccattcttcagtatccattaacattttagaaagtttttccttttcttcttcatttgcaaaatctttatattcatcttctaatttacctcttaaagtataaatatattcttctaatgcattcttcttttcttcagtttctgcaactaatttatcagctgcaaccatcttaaattctttttcaaacagatcatttaaaacttttgctggtaaagtttgaccgaaatattcaacatttaagtccttagttttaactaatttcttaacaatcttatattctggttccttaacttcagcttcttcgccttcttcagtttctccaccttctttcttttcttcttctggttgttcaactaattctttgaattcttgttcagaaacaatatatgcttcttcaatggtgtataaaccggaaggatcttgtctaaccttaattttacaagttgcagcatcatcattttctggaatttcaacaccagtaattgaccatttaccaataacttcattagtttctgctggtaattcttcaacatttgagtatttagcaacaatttcaaaatcatttgatctatataatgtaatgattttagtagatggataatttgaacccttggtgaaaacttctaaatgatcagtttcttcagtacctttttcccaactgtaagtaacggaatgcaagttaatatcttcaaatttgaatggtttaactcttaaagttggagaatgcattgcacaaatgaaagctgcacctttagcaattgattcatcttgattaagagttgttgaaaattgtttaccgaaaatttcagtaattgtatttttcaaacatggaattctagtagtaccaccaattaattcaattgaatcaatatcagaagttgataagccagccattttaagagcatcagtaacagggtttgcaactctttctaataaaggtttaactaagttttctaattcttctctagtaagttgagatgagacatcgacatcattcataactgattcaatattaattggagcagcagtattagcagataaaactttctttaatttttcagaagcagttaaaactcttgaataagcctttggattagttctaatatcaatcttaaatttttctttaaattcatcagcaaaatattcagtaattgctctatcgaaatctctaccaccgaaatgtttatcataaccagtacctaaaactttcatttcaccctttttaattgcagcaacagtacaagtataagatgaatgaccaatatcaatgaatgcaattttttttggttcatcttctggtaaatcagttttgaaaacaccataaccaacagcagcagctgtaacttcattaacaattctaacagggtttaagcctgcaattttacaagaatcagctgcagctcttctttgagattcagtataccaaacaggtacagctaaacaaacatctttaatatttgatttagtttccttttcagttgttaattttaatttattaagatacattgcagctaattgaattgaagtaaatgaatgtttttcaccttgatatctaacatttgcaattgtattattttgttcatcagatgataattcaacagttgaatatttttgttcaactgataattcaggtgatttaccatttaaacctaataatctctttaaacctgtaacagtattttttaaatttgaagtttgttgagttgcaccagtttcaccaattgctcttgccttcataccgaaaccgacaattgttggagttgctctatttgagacttcattaacgacaacgtcaatacctctatttcttgcaactgcaataactgagttattattacctaaatcaataccaaatggagtagacattatattttagtagattcttagttaaatgaaagaagtatttaaaagatataaaactaaatgaaaaaagaaagattcctatgtaaatttataaatattcgtccattctacccatttccttaaaatgaaaattttcacacatgcacggttaatataggaaattttgacatcaaatttgcccttctaataagactttccttggttggattcagcgactgagagactgtgagaaccttcgagaagaattacttagtataactgcgccactgcacataggttacgccacccatcacatgtattcaagtactgcgccacctgcattacgtcatcattactattaaataatactttccttaactgcgccacttcctcacttgacataaactcaccctcatgttgctgtaaccacaattgtacatggaagtctctcaattctgctaccacaattggtgtctcttcaatattcatatcttgcgtgaatttaatactatgtggaatgtaatttttaatattatcaatactaacattctctccatgtaattctctatgttcaatagggaatgtagattcatatgtaaaaatattctctgatgatgatgattcttcagggaatccatgtgttaatgatactaataaatattcaactgggaatgttggtgatgccttatgttttacaataactccatattcattcttatcctcatagaatatatctggaatatatctcttacgcgttttagatttatcatcattttcattattaatataaacttgccctggatgtgtactaccaacaattatatcccccttgactaatgcctcagcagattcacttgcttgatatgctgctatatcaatctctccattggtattaccactaataatacatgtaacaaacctactactaaattcttcattcttttcactactccatttacaatgatggttgaatttattttgccatttagctgctaatataacttcacttgatgacatgaaaaaggatttattatgtcttttacaaataactttaccatcatttgtacctgcatctgataaatcagtataaatcatacctaatatttccatccccatatccaataatatcttgttaacattttcaaattctttaccattttcaccatctttactgaaatcttcaattgatataccatcatcaaaatctttttgtggtaattcataaatatccgaaacaattgccttaacacctaatggtactttatcatatctatcatatttaccaagtaataacccaactctttgtctacctgtatttctccatgctccaataaatttatcaacaattgtaggacttaaaatttcaacatgatcaactaatctatatttttgtctattaagtgaaattgctgatggttgacattgtgaacaaatacctcttggccatggtaaatgtcccgatggacatttctctaaaactgtgaatctactaggtgttaaaactggtatttgactgttctcatttaatctactacgcaattcagataaatatgcatgaaacgataaatgtttaattccatgatctgcttgatattcttcactccatggcggcaatggtgaacaatattcacacatacctctaggtccatgacgacaaaatgagcccatttgtctcttaattaatcctttatcattatctaattcatcatccatcttagattgccttggtttatttgatttctcttcagttgggttattattaattgcaactgatgcagaattactaccttctccctcaataaaatcaattgctagcatttcaccattctttaatcccagttgtgcaacagtaacaccctgaacatcattaacacttataatattaccattattcaattttacacgtaataattcaactggtatttttaaattattttgtgaaatttcattgaaaattttaacaaattcatcattatcattacatgtaattctgaattgacctgtcttacttctaaatcttaaaatcgtcattactcaatgtatgaatctatagttaaagaaaaataaattagacttaaatttgcctttgtaaggagaatgcatgaatcttgaatttttcgtaatcattgaaaatttgaaatttttattacataatatattaatcagagttattcaattaatttagatagttccccaatctcttctattttatcccaagataaccacccattcaaagcataatgacaataaagttatatgggtttagtaaatatgcattctatgattctttaatgaagataaaagatttaaatatggtaagaagtgatgcatattatatttcacgtcaacgtagtagattatccacacctgcaccaaattctttagaaactaatgcaaaatcaatggttttcgatccaaaatctaagggtaaaacagttaaatatagtgatgtttttggaggatcaactaaaactgctacaaaatcttcaagaagagatgtttcatatcgaaataagacaagaaaaatagcaggtgtaattgtaccttcaagacctattgaacctgataattgttgtatgagtggatgtattaattgtgtttgggaattatttaatgaagatttagaagattggagacataaacgtatagttgcagcacaaaaattaatgaaacaagatattaaaaatggaaataataaaattgaatattggccaagtgattgggaggtacccccttcaattttagataaaaaatttattttacatgataaaaaagatttaaagcactcaaataaaattgatgaagttaaaggtatgcctgttggattacaagcatttgcagcttttgaaaagagaaagaaagaagcaaaggaaaaggcaagtaaattaaaggaatctgaatccgataaatcattatcaaaatcaaaatctacaattagatcagttaatactgaaaatatacaatctagaagtgaaactatttctcttaaccaataaattccccttaaattttgtttatattatttatttatttcgttcatatagtttgtttttttaaagaatacacataggttataactagataagattataattataattaattaacatcaacaccttgagattttaagaaagttttagcttcagaaatttgttcctttaattcaatatatttatcttccttatcttgtaatgtataaactccataacctaaactaaataatgcataactaccaaaactaattaatgcccaccatggaataactggtaaaatttcattatggaaaatttcagatgttggaatgacaccaaaatataatgcagcgtatattgatgtaattgcaaaaaagaaaactgcagtttcgtatgctttagtcatggtttgtctattaaacaataatgattaagatgatgataattagcattaaaatctattgacacgtacaaatttgcgagatttcatggtaataggttttcaaattttaactttgcctggggagtgaccttttttcatcggttcacgcgatgtctttactgggaagccctcactggagataatgtactaaagtgttaaagtcctatagttgatataaataaatattaatttaaataacaaaacgagtaagaataagaaagtaagtaaaggaatgaaggtattaaagtaaaaatatacgtgtgaaaaagggagttgaaattataataatgcagcaacaaaaccaatgaaacctgcaaatacacctgcctctaattgacctgcaccatttgtgtgtgaggttgaactaattgatgaaactgtactaacagtacttgaagaactagtttgaattgtagttgaactaattggtctatgagatgaactgattctagaactactctttgaggaagttgatttaccattaattaaattcttttgatcaatagtaagatataatgaagtagttgaagatgaatcacctgttgcaacaacaaaattagctctagttaatttatcattagttgatgttgcatctgaaatgtaaagattcaaataatcatcaacatcaacaaatttaccaacatgttcaattgagacaccattatcaatcatccattgagtatctttatttgcttcaggcaataaaaatgatgcattaaatgatttatcaagtgattgaattgagttagtattacattgtggtctttcataatctggaatatcagattcattgattttcggaattttagcctttgataattgatctttataattaaaataatcttgtaataaattaacatcattttcatcaatttcaactaaaccatatctagcagcttccattgaatattcataaattaaaccaccatccattatatcagttaatcttgagtcataaacaccttcactaacttcatcaaaagttcttggagattttgtattacaaccatattcagagaaaaaaaatggaactgaactattctgaaattcattttccatcttagaataaccagatgattgccaatctgagatacctgaacaccattcataagaatttaaaccgaaaaattgaatacttgaatcaagtttttcatcatcattttgacaagttaaatattcaaaagttggttttcttaatgataaatcatcagcagctgaatacccaacgaaaatatctctagcggatgtattattatcatcctttaatctattttcaatataaactcttgcatctcttgtaattgcacgtaaatatcttggatcaataccagctgatttatcatcgttgataacttcattaccaaggaagaaaccaatgacatttgaataagttctgaaactttcaataactttgaaaacacgactcatataccatgcattataggtaccttcaggatcctctctatttaaactttcaccacctaatggagaatttacatctaagatgacataaatacctgcactattgaaaatagacatacattgatcatgatttaaatctggatcaatagtatagatacgaattgtattaatacctaaattttgtaaagcagttgcatctctagcacaaacatcaggatttgttaaaacatcagatgtcatattatatgtataatctgatgaaccaccaggttgataatcgacaccattaatgaaaaatgcttcacctaaatcagaatctaaggaaggttgaacaaatttattacttttaatagttaaaggtaaaagagcatttgcttgttgaatagatgatccaacacagaataaagttgtaacaacggcttttagtaaaagcatattgtgtgtaagtaagtgtaagtgtatttactgaatagaaaagcaaaagaaagctttaagaaaacaaacaaaaaaaaagaaaaagaaatcaccttgtttacaaatcgttctctcagatggaccccacagatttgaaataagaaatgtaaacaaactgaaatttttttattttcgtggtgctacttatccttagagattggttgaactttattgactgggacttatgatcttttatccattggcactttctcttagacaatgcttaacgtatccgctatcatccacttggctcgtactgttgtaggatccggaattattctggtatccattgtatctgccctctcacttgctgcattgtatgttttccaaagaaaattagtatacccatcaatgctaaataaagcaagggaaaaagtggatactcctgatatgtttgatattccatttgaaaatattaaaataaagacaaaagatggcgaagttttacaatctttccttatgttacatgattcaaattcatctgattatacaaataaaactattctcatattatcaccaaatgctggtaatattggtatgttcctcccagttgctaattatatttataataacttaaattataatgttttcatatattcatatcgtggatatggccattcaacaggtcatccttacgaagcgggtttgaaattagatgctgatgcagtaatggattttattgcatctcataaacaattatctcaaagttcaataataacctatggtagatcattaggtggtgcagttgcaatttatataacttctaaatatggttatcaaatatctggtatgatattagaaaatactttcctcaatatacctaaagttataccacatatttttccacttttaaaaccttttagttggttatgttcagaattttggaatagtgaagaagatattaaattaattaattcggatataccttgtttattcctagcaggtacaaatgatgaaatagttccacatgatcatatgaaacaattatttgaaattgtcggtacaaagaataaatcagataaacaatcaactaaaatttggagagattttaatgctaatcataataatacaattgttgcaccaggttattgggaaatttgggcagattttacaaaagaaatggttataccaattggtaaataatattcccaactataatactatatacatacacaaaactatccatagaataaatcaactataaaacaaatccatcctctccatgtgattaattcaacaatttttctaatccatttattttgaaaatgaacatataaactaccacaactattattaccctcttgatcgaaaacaccttctccatattgaatgtatctacgaatattacaaccattccaaaaattccaccatttagctctctgacatgcactaatacgtactaaatttttagttaatggtcctgttggtccatcaatatatttccattcaaatggtgaccaatgctgtcttggatcagatggatcaagttttggatcaccccatgctccatcatataataaccaattaccatatttagtttctctaaatggatgtgatccattaccataatttaatttcatttcattgctttcttcatcaggtgtaaatgtatatgcaagataatttaatgcaggattccaaagtcctccacgatctgtaaaatcacttaatatagcatatggtaaatcatgactatgttgacctgtgcttggataatttgcatgtgttcctctagcggaaaatatggcaggttgtttaccattaccaatacaaatacccgtttcctctaatgattccttttccatatgatcgtaaaaatatgctcctccacctccatgtgctgacatccaaacaacaactggttcacctttataaaatcttactaaactatgttcccaatcaccaacgtgatcaccaaatggtccaaatcccattacaaatggacctaaattaaatgaataaaaataaaaccaatatgcatcaacccatccattacccttatctgtaacaattaatgtagctggtgcattttttatttctccattatagaaatttggtttattatatttacctgttaaccaatcaggatctgtgtcaaaatcttctaatgatgataaaaacactaattcttccttagtagatttcggtaatttctctaaatctgataaatgtaatttttgatttttataatatggatcgttttcatccttacctggtatattaattgttgaaccatttctccaagtaggtcggaaatgaccaacatatttttcaatatcatatggtaaatatcgttcttcactgtatagaaaaaccaatggtgcataatcagtaacatattgaggtatttcacctggcttaagtgtcatggattcctttgatgggaatgcctccaatggtggtagatttttataaaaaggttttgccttcatcattgcatctattttagtttctgcctcattgttggttaataaatcaattggtgatccattacatagtaacatatagtatattgtaaatacccaataatttattgacatcctgggtatcattgttcaaagctgtttaaagatgttcaagagaagaagctatcaactgatcgtatacagaaactttacaaaacgtttcaaagggcttcttgcagacacttttcaaaaccccgaagtatccgatattttttattttaatatggataccgattcaggaaggtttagcgatgggaatttttcaaattgttgatttagttgaataaacagatcaatactacaggtttcctttgaaagatcaatgccatttacgtgtaaatgacagtgcaggaacgtacacaatgtatatcattgactaagaagggattacaatgcaaactatacgctctaccaaatgaaaaggtgtgtcacgtacatataaaatatcaaaatgatacgcgtaataaaaacaacagttcagttaagacggccacaagtaaacggaaaaatagcaactataactacaataacaacttggggaaagttaagaattacaaatatgagaattatgaaaagaatttaagtgaaattgatgagaaacctggtcacatctatgtattcacatatgcccatatgatgtactcaacgccaacagagaaatcatatttacatttggcagcaccaacaaatactagaggaattgattataataggacgacgccatttgatacgtcagataagatacttatcaaagtagggtatacaagaaaaagcccagaaattagagtaaatgagtggagagaacaatgtggccattcagaatttatccttttatatccggggtgtttagttccaacttatcaaaatcttgaaaataagaaaaagcagaaaattacccttttgagtaaaatgatgtcaaaattaagtttgagtaacaatagaaaaagaaatgatgataaagaaatattattgaatagacagcacacaggcagaaaatatacggggttaaactccacaaaaacgtgtttcgttagcaataatccgtatcaagtggagcaaaatatacatcgaatactgagaggtagatatggttatggtaaaatgttttgtgaaggttgctcacgtcaaaaaattgactcaaataaaaatacagtgaagacgttgggtattcacactgaatggttcctcattccaagaaatgagatgggtattgtttgggaagtaattaatgaacaatgcaattcatcatcgaacacacgtttcttcaaaacataaagttgtaccaaaaattcatttggccgttagcttttctgctcgttttctgctcccgaagaatgcatgaattgcatacccgttgctgtttttctgctccgatcctcttatcttttcttttgatgattacttttgttactgataagtattttcatcgtaaaaattgtggctaattggaattttcattggctaatagttgaatcagatctttaccattgaaaaattagaaatgtctataaattggtagttcatttccactaaattttgtaaattatccttctacgtaaaattatctttagaaaatcaaacaaaacaaaacttaaatgaaactttcaactatcattacattactctcaggatcaactgctcttgcagcacctctcgctaaagctccttatagtaatgatacaacctatatgccattacaatatttaaatggtgctttaccattaccaaaaactgatggctttaacttaggtgaaatttctgaagaattatttaacaacgttaatgtctctgcttctttaatttcattaattgattgtgcaaagattggtgcaattaatgaaggtaaagaaattttccatgttataactggtgatatcaaaggtttttttatgaaagatcatacaaatcaacaattatgggcagtttatgatggtaatccaacaactgaattagtatctgagttagttgaatatgttccaaagattgttcaagatggtaaaaataaggttaatttcagttgtatcgattgtatgattgatgaagctcaaatgttagcttcagatcttgtcttaaaggatttaccattattcctcagagaagttgctcttaatccttcatactcaatttatgttgctggtaaagcttatggtgcagtttctgcagctttaactagtaatgagttgtctcttgcagacaatgttgtaagtttaattacatttggtgcagcaaaatttgctaatgttgcattctctgaatatatggatgaacattatggtaaaacaactacagaagatcttgcaactcacagtaacaatacttatttaagagttactactgatggtgattctactccattatttccaatttttgaaactgattatgcacattctggtaataatgtcaaccttatcaaacaaggtaatgatattattggtggtatgcttagaggccaatggaaaccagctcaagatgcattaactattgaatcattatctgatgatgttaagaatgctttaaagaccgctttcactattccaaaagcattcattcctggtattgctgagtttactggtaacttattatgtcctgttaatacttatgcttcatagtggtttttttaactaagtaaaactattgatttcgattgttattacacgttttatttttattgtttatcttctttattatataaaatataaaacttttttaaaatattgggttttttagagtttttggctctgatataattttttaaaaattgggagcatccttgatgttcacttttaagaagtatgattttttcaaaaattttaattttttgctcaaatttgattgaaaagaaactaatcaaactgttcagtgagtacttgacctttctttccctaactcaacattataatactgtgctattatacagcagagtatctaaatttgagagacaccaataacacaaagttgagccacctaaaaatcacgacagaaaagtatgtcgttcataaaatctactgcaatcaactcgcttaaagtttccctcccgagacaacttgtcaaatttcagggaagttgagataactgagaagttgactacatcaaagcattagaattgattcattggaatattatagaatactaacatcaagaatcttttaagtttcaacaaggaaagaatgtctatcaacgaaggttatacacttacagttttaggtgctggtgttatgggatctgctgttttatcagcaattttagcatccaaaccaagtccatttccaggtaaaatttattgttgtacaggatctgaatcatcagcacaacgtttacaaacaacatatggtgaatcagtaattgctacttttggtaaagataatgttaaaccagttgaagaagcagatgtcatcattttaggttgtaaaccttacatgtgtcaagctattattgatagtgttaaaagtgcattgaatagtgataagatagttatttcattattagcaggttggactattgaacaattacaaaatgttagtggaacttcatatattgcaagagttatgaccaatacaccagctaaatatggttgtggtacagcaatcgtttcattctcaaatgatttacaagattctaaatttgattcaactagagattctataatgaaaattgttgatactgttggaatggcaatggaattacctgaaaaaaatatggatgctgcaacttcattagttggttcaggtcctgcatttgttttattaatgatgcaagcattggctgaaggtggtgttcgtatgggtattccatatgaaactgctaaaaagtgtgcagcaaaagttatggaaggtactgcaaaaatggtattagagagtggtcaacatcctgaagctttaaagagtatggtttgtacccctggtggaaccacaattggtggtcttatggttttagaggataaaggtatcagaggatcaatctcaagagctgttgaagaaggtgcaaatattgcatcaagtcttggtaagaaatagatttattttattttattttatatttacatatcataatttataaaacatttaatcaaaatataattagcaaagggtatatcaaattgaatcagcctaaactagttcttgaattcactcataatcttttgatattctgcttctttcaatttttcttcatatttgtcagcttcttcctcttctaattcacctctttcaaatttttgtctatattcactttctttaaccatagcagctttctctctagcatatttttcctcttttaatgtggagaatgtcaatataccaaaccaaacttcaataaaactataactgaaaacaacactattacaaaggacaacccaatcacctaaataacaataagcacataaaccgaaaaagaataataatcttgcaaacactgcagattcaaaataagctgtattaccttcaattaatggtgcagcatcactcaaaataagagagatcataagaacaccaatagttgcatagattggagatttttcattcaccattaataatggtaagttcattgaagaggatagaaccagaacacctgaatattcaagaacagttttcggagaaacaatcagataatatgcaatgtaagagaataataagattcttcctgataatagaacgtttgatgagaataatgccatattggttgtttgattagaagttattcaactttaagatcaatggttaacgtgtttaaaatctgaaaataaaaagctttaaattttcatgggatcaaatttctaagcgacacggagttaagcaactgatgaagtttcagttactttgtttctttactagtaataggagtataatagtagtaagtaatgatagtagtgacatgagctacagtaagtttgatacatctacattggtgggtatagagtgtattcttgttgttatgacttaaaagttaacttcacaccccatgttatttatacgtgtattattcttgtaatacagtagtacgacgtatgactactgtttcaatctctctgttgctctacaaattatataataagtacgatgtaaccatctataaactctctataatccttccaaaaaccagagtaatagataagaaaaagtcgtttcatcctactaaggtgacagcgaaatcaattatcatgaatttcatcataaattttgtaggataagcttccatttcacaccgtttctttaatctaattatcccgagggtccattttaattatacaagtcaatagttaatttggtaaataaataatgtcgatgggaaatatatctaaaataggtaaactaggacaagtacctgaacttcatccaacaaacgaggagtttaaacatcctattaaatacctctcaaaacctgaaaatattaaacttggagaaaatttcggaattttgaaagttgttccaccaaaaggttgggaacctagattttcacttgattgggatagttttaagtttcatacaagaattcaaaaattacatgaactaaatttaagaaatagatcaagagcttgctttgttgaaggttttaattgctttttaacgtcaaagggcatagatccattccccgttgatgatgatttatgtttaggtgtatcaaatgattataaattatccaagtatgatttagactctcatcttaatggttggttcagaacaaatgatggaggcaaggtccatatccatgatatttttataagtaaagaaaccagaaaatggttttataaaataatggatgatgatagagatcttttgaaaaaattgagtctttactgtaaatatttatcacaaacacttagattgaatgataatcatggtgatgaaaaggagaagaagaaatttgatgattctgtattaccacctgaagtatctcacaaaactttacagaaattattaatatccccagctgctttattagtgcaaccacaaaactttaaaaagttagaaagaatgaaaacaagaataagcaatactaggatgaaaaatgctgaaagttctaataaacgtagaaagttacatgatacccttaatacccaactattaactccacctactgaaaaaccttcaacttttgaaaattctcaattctctacaccgataaacaatatcccatcatctgatccgataacaccaccagatataatatcaccagaatcattggatgaaacatgtgtgatttgctttagtgcacattcacctgaacgtacattaatatgcgatggatgttcaagaggtttccatatggattgtttgtcatataggttagataaagtgccaaaatttgattggttttgtaatgagtgtcttgttggttctacgagtgtttatgctgattatggatttgaagaagaatttgcaaataaattttcattaaatgaattttcaaaatattgtaaagagtgggagaatgagttttataattatttaagaaatcataatttgattgataaattgcagttagaagtgatagaagatggaaaaggtaatcataaattcagtgaagtttcagtagagaaacttttctggcatttgactaatggtactatacggataccgaaatcatcaaaactaaaaattagatatggtgccgacataaatagtaaagttccaggagaactatcaggattcccaaataaggatagtataagtaataacaatgaagatgataaatatattgatgatgaatggaatttaactaaattaccatttgcaaagggtagtttgcttgaatatgtttgtaaaagtttaaatgatgaaactggatcagaggtagaatcatctgaagtcaaacctgaaggaatatctggtatgtcaattccttggatatatgttggtggtccattatctacattttgttggcataaggaagattattatacattatcagccaattattcacatttaggagcaccaaagaaatggtatggaattgcaaataaagattgtgagaaattcgataaaataatcaataatattgcaccagaatatgaagctaaacaacgtgatttaatgcatcaattggttagcatgatttcaccaaatgaattaaatgaattagatgatactgataaaattccaatctatgaaacaattcaaagaccaggtgaatttattataacattcccaaaagtttatcattcaggatttaattatggatttaatgttaacgaagcagttaatttcacattaccattatggataccttatagtacaactgctattaaagattatgaaaaagttggtaaggaatgtgtgtttgatacgtttaaattattgaagaaaatatacattgatttacaggatgaacagtgccaaagggaatggatggaagataccgggattacttttaatcaaattggagaattagttgaatgggttaaaaatcagtataatgaagagattgtaaaattccaagaaatttataaggatgaggaatttagtgaactattgaataaagttgaaaaagtaaagattgttgattatctgaaagaaaggaaaataattaaaaaagaggataacaaaattaaggaggaagaagatgaagaagaagatgaagaacttgaggatcgtgtttgttgtgattgcaaaactagagttcattttcaatggatggttgtggatatttataaagattgcatgaaaggaagaaaaattatggtgaaagaagttaataaacaggaggaacaaaagaaactgaaaactgaatttgaattaggaattaaaactgataataattacagagataaggaaagtgaatgggaggcaataattagggaagctagagaaagcggcaaaacagagacggatgaaggacacacaagaaagagaagatcatctcgtcgtaaaagagaggaaacaattgaaataaacgaagataaagacgacaatggaaatgataatcgtgccaaggaacaagtctactctgcacttgaactactgcattatgaaaataatgcttttggacaatgtgtattctgcatgggatgtttctccaaagagttacaaaatttgaatgcaagtgaaaaggaaagagttatcagtgtcagtagattagtgggagagtagtttgtgtgtataactataaatatgaataacaattctttataaacaatataatcactacttgtaataccatatagctatttcccagagtagacataaatagctaccgtaataggcaagtgcactttgagcccccactgaaaacatgctgtaaaagttggccaataaaaaagcatccttgtttgcccgtacgcgagagtgacagagttcagctgctggggaattttatgggcagtaataattaaaattagtgggcgcgaatgatgggtagccatggggaatttttttcagtggtgttggcaaaattcaatttttcaaaggcgttctttcacttttcaatggaacttgtcgctttcaatttactttactgcttattttgtcctgtgaatttagtttcctcttgctccttttcattttgatttcattctttctacatcgctacattctatagctctcacttaaacaagatggttgctagattatttgccacttcatcaagaactgccttaaaggctgctaaggctaacttagcattaaacagaggtttagctactgcagcaccagctgtcggtaaagtcaagtaagtattaatttttctttcattatgatttactcattataatttctacaatccacaatgtttgctaattgattatacgataattaaaaagattggttggaaatagtttgaattggaaatatcatcgtttagtcggtttttattgtggttatatttttttaaataaaacttgattcatctcaattaaattatgatattttacattcaatctacattctacatcagtctttagtatattactatttaacatctattcattatgattcgccaataacgggtttagctttctttcatattgaaatccaaaattttccattttcgtcgaattttccaccacaaggaaaaatttcgcgcaattggtcaattcaatattatgattatcaaccaatcaattattagcattcctctcatataaatgaactaaaatactaacattattatcattactttttatctattataggtccgttattggtgccgttgtcgatgtccaattcgaacaaggtcaattaccaccaattttaaatgctttagttatggaaaacgatggtaacaaattagttttagaagttgctcaacatttaggtgaaaacactgttagaactattgccatggatggtactgaaggtttagtcagaggtcaaccagttaacgatactggtgctccaatctctgtcccagtcggtagaggtactttaggtagaattttaaacgtcactggtgatccagtcgatgaaagaggtcctgttgaatgtaaggaaagaagaccaattcatcaagatccacctgctttcgttgaacaatccactgaagctgaagttttagaaaccggtattaaagttgtcgatttattagctccatatgctagaggtggtaagattggtttattcggtggtgctggtgtcggtaaaaccgttttcattcaagaattaattaacaatgttgctaaggctcatggtggtttctcagttttcactggtgtcggtgaaagaaccagagaaggtaacgatttatacagagaaatgaaagaaactggtgttattaacttagaaggtgaatcaaaggtcgccttagttttcggtcaaatgaatgaacctccaggagctagagcaagagttgctttaactggtttaactattgctgaatatttcagagatgaagaaggtcaagatgttttattattcatcgataacattttcagattcacccaagctggttccgaagtttctgcgttattaggtagaattccttccgctgtcggttatcaaccaactttagcaactgatatgggtttattacaagaaagaattactactaccaagaagggttctgtcacctctgtccaagctgtctatgtcccagctgatgatttaaccgatcctgctccagctactactttcgcccacttagatgcaaccactgtcttatctagaggtatttctgaattaggtatttacccagctgtcgatccattagattctaaatcaagattattagatgttgctgttgttggtcaagaacattatactgttgcaactcaagttcaagaaactttacaagcatataaatctttacaagatattattgctattttaggtatggatgaattatctgaacaagataaattaactgtcgaaagagcaagaaagatccaaagattcctttcccaacctttctcagttgcagaagttttcactggtattccaggtaagcttgttagattagaagaaactattacttcattcagagatgtccttgatggtaaatacgatcacttaccagaaaatgctttctatatggttggtggtatcgaagatgttatcgctaaagcagaaaaaattgcttctgaagctaactaagcatcaaatctgtgattgattgttgttaaacttcttaaacaaagtttttagaatagaaaaaaaaaccaaattcttttttgaatagaagaataaaaacattcacgttactatgattttttatttatttatgattatttattcctatccctagtgatttatttatatctctaagtgtctctttttatatttttaatttaaaaaaagatttatttattgtttgtattccttattttatttccagtagaaattggtaacagtgaattttgaaagctccacgtaatgctttataacaagatcgcgttataaaatattcaacatgcaaatcttgtgttcaccacattaatttgacttcttttttgcccttcttcttcgttccattgaccagcaatgatttctttcatggaaagtgcaagaactttgatggactgtccaggtttcaactggaagtctttgattattggtttcacggtttcaaattttcttttcgatacctatgttaaataccgtcaaattaaatgtgtagaaaaaaatggtgataaaattccaaaagaattaacaaattacaagatcgattctgaaacaatcattaaatcaagtaaatacagtttatcaaaattgaagttttcaatttttacaggtgcttatgatttatttgaaaatttattattattaaaatacgatgttttaccattagtttggaataaatcagcttcaattttaaatagtcttgcaactttgattccttcaatctcttctattgtgcaaaatagtgtcatctctcaaagtttggtttttatgggtttattcatgtcaatttcaattgttttaagtattcctgttaagtattataataatttcgttcttgaagaatcatacggtttcaataagttaactattaaattatggatttctgatactattaaacaatttttattaacatgtgttttaggtggtccaattttagctgcatttttgaaaatcatgtacatgtttggtgattcatttatgtattacttatccgttttcttatttgctgttcaaattttcttcattattgtttatccaaaattcattcaaccattattcaacaaattagaacctttagaagacggtgaattaaagactgctattgaaaagttagctaaggctaatgaatttccattagataaattatatgtcattgatggttctaaacgttctggtcattcaaatgcttatttcatgggtttaccatggggttctaagcaaattgttttatatgatactttgatccaccattcaactaaagaagaagttgttgctgttttaggtcatgaaatcggccattggaaattaaatcatacaactaagttgatggtaatcggtgaactccatatgtttatgattttcactattttctcagtttttattagaaatagatccttctacaattcatttggttttggtttacctaatggtatcaaggaaatgccagttatgataggtttcttattatttggtgatgttttaaaaccattggatgctgctatggaatttttcatgaatttagttacacgtacttacgaataccaagcagataaatttgctgcagagcaaggtctttctgatgatttaaaaacttctttagttaatttacataaagaaaatctttcaagtttagtcgttgatggtctctattctgctaaagaatataatcacccaacattaggtgaaagaattgcagctattgataaatacttagcagaaagtaagaaggagaaataattttgtttatcaagtagttcaatgacatatacatgtattataaaggtttataaacttttttttattcataaaatcagccaataatttcagtaattgtaaaatatgatcgaagggtcaaaacggattatgtgtcaccgccgccgttaaaatttccgaaaaagtacctaatcgggtaatcgcgcttaattttgattatttttgaagtttatttcaatcaacgaatcaatgatttgttcaatctttttaagcggggtttttatcctgttgacatatattttctttctaaatcatcattttgtggttatacgatagcaattttgatctattttattaaaagtttttaggttttaaattagcaaaatgttattgcgaaatatatcgagatatattcaagtgaaaaaaatcactaactttgacacatttaaaagaatacttagcacgatatctgatgaaaaactttcattattccaaccaaattttgtgaaaatttccaatttacgaaaacatcgtaagttatcaatggaaaaacatgaacttattcttacaattttaaactccaccgcaactaaaagagaggctcgaaattatcttacaaaatatagaatacttgatgataatgatatctacaaaaataaacacaaactcataaatttggatgacaatgaatcacaaatggtgacgaatgaaggttattcatcatacattgataatattttgagtgataatgcatctaataacaatcatgaaataggtctcgaacattcgccaaacaacataagtagcgataatgcatcaaatgacatcaaatctacacaaactatcagagtatgtgcattaagaataaaaaacttagatcaatggtctgatgatcaaatgcaaaacttagctgtcgttttacgtaaggccatgagtttaggtgctagtccactaataatcattgatggcgatttgttaaatagttgtaattctacaattgaaaaagagaaagagttatatatcgaatcaaagcttgaacaactacttgaaaattttggtgaagtattaccttctagaattgtccaaggatgttttgatatggatgcagaaggtaggttgactacagttatacctgaaatgattggagttccactgatgtcaggaataatacctattatatcaccaatagttgttaaatcaagatcactagaaagaacatgtattcaaggttttgaattgacgaatgcaattgtcaaatgtttagaagaaaaagatttcaaaggattgttatcagttgaaaaagttgtttttattggacacacaggtgggttcccaagtattgaaagatcaaaaggtagtcatgttttagttaatttattacaagagtatgatgatatcaaggaagaaattacaactaaattgaaattaactgatgagcagagatctattcatttatcaaatttaaatgagatgaatcaattacttgagagatctcctaacattactggtatgttaacaaccgttaagatgtcaacaagagaagaagagaaacaagtaggaaaagaaacaaatcctattatatttaacatacttacagaccgtcccactatatcttcatcattaccagtttcgttacgtagaactccacagttgaataccactatcgttaaaaaaggtatgtccatcacaacattttttaataaagatcctaaaaaaggtttagatttaattgaaatggataaacttggtaaaatagacttaaagaagcttaaatttttgatggatgattcctttggtagagatctgaatatgaatcattaccttaatagaataaataaaagagttgcaggtttgattatatccggtgattatgaagggggtgcaattattacttgggaagactcaaaacatggttctgttgcatatcttgataaatttgctgtcatcaaaaagaaacaaggtataccaggaatagccgatattgtattcaaagcgatgttaaacaactttaagaatgaattgttgtggagatcaaggaaaaacaatcctgtgaataaatggtattttgagagatcaaaggctaatgtttcaattccacgtactcaatggagattatttgttactggtgaacaagaattaacattagaaaagttaaaagagtattcgaaaatttgtggatcaattgaaccatcatttgatattgatgaatcagttaaggcttagattcacagttatagagcataaaacgaaatcaatcgtttgaaaattatatttttatagaaaagtttcaaaaagtttagtaacgaaaattaaatactatataaacattataaggatgtataaaatcaatcattaagtgcatataatgtgataatttttgtgaagaatagatataattttgtaatgtacatggaaaattgttttaaaaacacacactattagatggatttagacatataaacaccatccagttcataacccaatcttctgtaataatttctgacaccgacaccagaaataacactaatttttgaagagccgtgttcttctcttgcaattctttcagcttcttccataagtaaagtaccaaaaccttgatgttggaattttcttggatctctagagtgtaatggaacgacagaaccataaacatgtaattctctaacaatactcgtttgttgacctttgaattcttttctatatgtgtatttctttgaagcttttcttagtcgaagtaaaccgataagaatatcttgtttaggatcttcataagaaaggaaggtttcccagcctccgttagcataataatctcttcttatcagttcaacttgatcaggttgaattttatgatgcacttcttggataccaacttctctagttctcacatcacgacatgatgtaccaaaatctttcattctagctaatgccaattctcttaaattaccattttcaacaccagaggtgactaaaggcattgggatatctctttgaactctataaattcttgtccaaggtggaactaatgccataattctcgcaactaaatcaattaacatatttgcgttatatgatttgtacaaaccgtttttccaaagttcgtataaaccagtacctctaataactaaagttggataaattttcaaaccatcagttctaaatgcaggattttcaaaatattctttaaattgttctaaatctctttccataccaacatttggtaaatcaggcatcatatgagaaacaactttataacctgcatcttttgcataagcaaatgtttcacaaactgctttgacagtatgtcctctattggtatctcttgcaacatcttcataaacagattgaacacctaattctaatctagtacaaccataacgtaacatatcatccaaatgagtttctgtacagtaatctggtcttgtttcaatagttataccaacacatttagtttgtgattgttgagaaaatgcaaccgcttcatccaaatcagtaccattataaccagttaaagcattatgtaattgaacaataaattcttctctataatcttttggtaatgacataaaagtaccacccataataatgtattcaactttatcaatactatgacctaattgtctcaattgttcaattctacctctagcttgttcatatggatcatatcttgctctaatagctctcattgatgttggttcataaccggtataagattgagttgaatattcaaaatcagaatccggaccaccaggacaataaacacagatgttaccagtatatgcaatatgtggacatctatgtggtttagacataactgcaacaactgcaacacctgaagcagtacggactggttttgcctttaattttggtaataaatactttttatattgatctggaattgagctgataacatcagtcaaacgtggttgttgtttaagtttatatttcttagcatatttgataattataccatttaaattcacttcttttgatgttcctaaagatgaaactaattctaaggaaatatcaccacaacattgaacaaatctttctttttcagaaggtaatttttgatgtgttttaggaccttttgccattcttgattactatcagacgaatatggtgaacgttggttccttttcactaacaaaagctaacttttagtaatttgaaattataaaaatttgatagggattcatgattaaaaaatattccaaagtgaaaaaaaatattttatccgtacaccttttatttggtacctaaaattcactttttgatctcatgaagtgtccacatgtatttcagatccataacacaaaagggcattaatctaggaggatctttgaatttttattctcttctggagttatacaccaactaaaagacttatcgggcttcatatttcttaataaatattaaatatggctggtaaatcgaagagaccgaggtctaaaaacaaaaagaagaattctaaaaataacaattcaaatcaacaaaatcaacacgtcattcctgataccaatgataatgatgcagttgaagttaatgctgactcaattgatgaaaatactactgaattgaatgattctgaagctaaacaattaattgccgaagaaatcaatgctgaaattgatgcaaatgttaatccttttgatgattccaatgcaatcactaatgaagagtttgaacagcaaatcattcaaaccgataatgaaatttctgaacaaacagatgtaactagagtcgaagaagagttagctgattctaatgaagaagaattaatcaatgaatatgttcaaaatgctggttccaacaacgagttaattccaaaagatgaaataattgaaaatgcaattttagaatcacgttttacagatccagctgatgatgaaatcaatacccaagagattgaacgggcaatagctgatgatgcttcaaatgcggagaatatccaagaaattgttgacactgaattaccaagtgaagatacagagaagaaaacattattattagaatccaacgctgatttagataaagaaattacagcacaatcttttgaacatagtgtacatgaaacaaatcctgaagtatttgatcaagatattgcattatatgagaaaccagaagcaattgatatttcagaaacccctaatgaagaagaacatctgaataaagagttaaattctgatatcaaaactattgattcaacaaactcacctcaagaagaaagattgcaaacagaacctgtggtggcagaagatgcagactttgatggtgttttttttaatgataattcaaaagatgagatcatgccatggaataataataccactaatgatgttgtaaagactgaagaacaaactctttttttcaatgataattctaaagatgaaatcatgccgtggaataaaactgcttctcaagatgttttggaaactgaagaaccaaccaccttctcacaacttgaagataaagaaaattctaataacgatgaagattcattttttgcacaattatcttctcaaaatacagatcaggtctttcaaaatccagtaaatgaagcagaacttccagaaactaaagatgaaattttgatttcagaagatttaaatgcagaattgaatgatgatgatgatttcttgaaggaattagcagatgataccaatgttgaaaattcaaaaaatactgataccgaacccgctgaagataattttgatttccttgctgaggatgatgatattttgttagacgatattatggatgatgacttacttgatgatgatgatgaccaacagcctagtaatgatgcaaataaaattcttgttgagaattcacaaatggataatacagctttgaataatgaacaaccagcacaagtttcaaagtatcaaccagcaaaacataattatactcctcaaaacaattatgcgcctccattactaaatcaaacatctgtttctaactttaagagcacagtttctgatcaaactccacctgttcagaactcatttattcctcaagctctacaacctaagattttaacgaacactcaaccagattttggcagttctaaccaaaaattagtaaaagaattaaagcaagagaaaaagaaatcagatgcttatgactttccacaagatctgtttccgaagaaggaacataccatatctagaaaagttagtaccaatttgtacaaggagattgcaaactctagtaaatacccccctgtacaacgaccagcttcaccatttcaacaaaatcattcatttgttccacctccaccagtcggaagtgcatcaaagattccatattcacctataccatcagctattaattccaatatcaacgtcagttctaaatcatcaaggtcaaattcaactgtcagtggtaaagtaggttcattttttgcagaacttcctgttgtccaacctaaagtacctttgaccgtcacaccaaaagtcaatagatacgaatcaatagagaaagcatcatctttaatgaaccctcccgtttcaagtacaccactgatacctcatttagcaacacaacatcatgcaccaacagcttttgcatattccatgaattcattaagtactgattcaacaaattcatttaaccaaaattcaaaatttgataatgaaccacttgtactcaaaaaatcaaccaacccatatgctcctgcaactgtaggtggacatgttagaagtatttcaaaaattactgttgaccctgatgagatcaaagctaatttagttccagttcctcaaaagccaagtattgtcattccgctatcttcaggaaatttcagcaatggtgatggatttacttcaccatttcaaccaaatcgccctactttttcacaaggaacccaagaaaagataaataaccaaccactaaataagtattctccaaatgtatctcatttcccgacttcaaatattcaaccaatggttaacaaacatcaaaatctatctgttccacctcacgctaatttgaaaagcaaaagtgcagccagaaataggcaatctatttcatctttgaatgatgtgtatggttctaacattgttacaagtaatgctacctcaatgaacactcgaaaagcttctgcagcaccacctatatctggtaaacatccaataccagttaatacttttacacctgcacctgtggttatcaatccagaaaatttggttagaagacaatggccattatttagtttttcagctgaaaacaaagttgcttctttgatcccaacatatgattcatacaataacgttattgcaaatatcaatattgttgatattaaagatgttattaaaaaggattcagatctcattacatatcccggaccattggttaaaaataaaactaaagctaaagttgttagtaagtggattgaagataaattaaacctttccaatgaaaatcaaaaactatcagattttgaagagcttatttggaaatgtttgaaggaaatggttgatagaattacaaaaccaggagacttatttaatactgaatatgtgaaaagcattgcaactattttgaatccatcattaagtcttcatgatgctggaagtaatgcatttgacatcctcgaattaactagaattactcaaaattttaatgctgataaaccattcaattcttttgctttaaatgacaccgggttgaaaactatccatgatatgttagaagttggaaacaaaaagtctgctttagaatttgctcttgctcagggtgactggactatggctctattaatttcaaatttgatgggttcaatagccttcaatcaagtcataaaactatactcattaaagatgcttccacaaaactcattgggtcatgacttaagctttttcatccaatcaactacaaacggatcattcactttggacaattttgttggaaaggaaagttggattgtggaaaactacaagattgttattccattcataatgatggataatttagaatatgggagaactttgaattttattagtaaccttttacttaaggctggttatagtttacatgcaaaacttttacaaattttatctggcacatcaatttcccatcagagtataaattcaatcccaacttcaattaatgatctaattataaatgaaatttatgactttgttttattatcatctggtaatcatccacctaactttgctagtggtttcccacatatgattacatcaagagttgcacacgctggttatcttgcagatgttggcttagttactgaagctaagaaatatattgatgcagcacaaactttaatcacatcaaaaactattttctgtgatccaattacattatctttatatgagaatttatgcgatagattatctcaagttcattcaggttggttaagttcaagattaagtcgaccacaattagataaagtctggacaacattagataaatcatttaataaatttgttgctggtgaagaattacctcaagctgaaaagaaaactgagggagtattttctaaattcacttctccagctcctatttcgagaacttcatcttctttagatctcaatgatgttaagcaacatatcaataattcaaattttggtacatctgttaatcaatcgtataataataaccgtattccaccaaattatgctatgccaccaaatgagccaaattatatgaaaaatggtaataaatatcattcattgaatcataaatcatcattgaatgaactttcatcaaatcaatatgcgccagttccacctgttgctggtagatatgaatctaatgctacaaacacgacaatggaattgggtgcaacttttggtaaatcagcatcaaccttgaatattgctaatgaaaatggtctttataaccaggttccacctgttagagttccaccgactcaaaattcaccaagaggacaccaaaccaacaagtatgctccaacaaatgctgcagttcaaaaacctgaaactcatgcttcttttccagctgtttctaacgtcccaccgattaccccatcctttaccaataaatattcaccaattccaatttcagcaccagttcctgtttcaaacacgaattttaatgatatgatgaatgaagaattaattagggattattcatttactgaaaaagatattttaccacctgtttcatctttatcatctgccaaacctaaatcacctgttgtttcattaccaccttcagtatctttaccagtttctgcaaatccaccaccatcgactacttcatctgcaccaccaccaccagtatcaagcttacctccctcaactcacaaaaatatttcacctccaatggcatcatcaaaaagaaaacctatcaatagatatgctgtttattcaggctcaacgattgatcaagatgaatctttgaatattatgaaggatagattagatgaagaaaataggaaggaaggtttttttaacgatatacagaaatctgatggttcttgtgaaaagcaagttgaagaaaaaattgataattattcaagaaaagaagaaacaactttaaagacacaaaacgttcaaattgatgtacaagatgaaattgaaaatgcagctgctaaaatttctaatgattttaccgaaactgtcactaatgatgttgttgctaatgatgaagctcttgttcaacccagctcaattgcatatgttgatgaatctttcatagaaaatccttttattgatcaaactgaaattactacagaaattgataactccataacagaaactgtccctgttaatgatactgcggatgttattgatcaatcgattaaaattgctagtgctgagaattctgctgtaactgtttctaatgttgttaatgttcaagacaattttgttgaggaagctagtaaaacttctgatgaagtcagagacgttgatgagaatgaagaaaaatttgtaaaaactgttgatgctgaatctgaaaatcatattattgatgtgaaagaaccaaagagtgaagaaccaaagagtgaagaaccaaagagtgaagaaccaaagagtgaagaaccaaagagtgaagaaccaaagattgaagaaccaaagattgaagaaccaaagattgttaaatcacctccaagcttccctccagtaggctcgaatagatctgcaagtagaagtattaataggtttgatgtcaacagaaacaataaaagtgtcagaaaacaagtcaatccatatgcatctcgttatgcacaaaaggttgaaccgaaaaaatctaattatgcatatgcacctgttgaaccagttgtaaatagtgaaaatcctaatgaaactccaatatcagagaatacaatgggtgatgttgatatgtttagttttggtggttattccattcccgaaccaactaaagttgaacatgtagaagaggaaaaacaagaagaaatccatgaacaacaatcatttgcagaagaagaggagaaagaaggtgctaaaattatagtggaagaagatgccgtcccattggtacctacgtttaataaacctaaaacaatcgatttgaaaggtagtccacttgaaactatgtttacaccacccacatctattgctaatttgaatgatcaaagaagagtttcatcaccaatttatcaatttactgaagaaaaaagatatcatgcggaagatactggggagtattatgatgaaattattgatgattctgatgatgaaagagaagcaaagaagaaggaagaagagaaaatgagagaagaagcagcaaagaaggagaaagaaaacgaaagattaagaaaagagaaggaagaagaaaagaagaaagacagtaataagaaacaaaatgataagaaggatgaaggtggtagttggtttggttggttgagtaagggtagagatagtgataagcctaaacctattaaggctaaattaggagaagagaattccttttattatgatgaaacattaaagaggtggattaataagaaggcgccattagatgaacaacttgaaacaactaaaggaccaccacctccacctgttgttaagaaagctgcaactgttcaaaatgttgaatcagttggaacaacatcatcgttaccagctccatcaatttctggatcatcaatatcaccacctgggccaccttcaatttcagcatcaccattaggtccaccaatgggtaataaaggtaaaaaggatggtattgatgaattactgagtatgaatactacacgtagtactaggggtagaagaggacaacgtagaggatatgttgatgttatggctgagaaatagattatatctatttagagtatttctatgtattttatatataaaaaattaaaaagtaataagtatttatatttagtttaatcatctattgattgaccaaatataagatctgctagggtatcattatcattatcattcacgttatttatatccaaattagcattagtattattaatatcgtcttcatcatcatcaataataactgttgaatttgatcttgaaggatgagacagtgatagtacaagtggagtcattgggggtaaatctgtcgaaacaggcattagaattggagatcgtcctcctatagattcagataaagaatcatttcgtgttaaaattcgtaaactatttgtgttgttatataaattgttattattattgttattactattatctgtgtatctatttattgcatttttcagttgtaaatgagagaatctatttgcattagtgatatttgagcaagatgaaattgatgaatgacgaggcagtgaattaggtggggaacctctcgatagcaggaaatttgaaggtgaaccagcaagcgatattggagctaatgttggagaatccggaagaatcggctgatgttgatgttgaagttgatgttgttggtgcggaagttgtaatcgtgtgacttgatttggttgagataacgatagcagtgaaattgaagacactgatggaacagacgctatggaaacaacagatggtgagtgacttgatgaagacattgtgttttgtttaatagtttaacagtatctgtggatgatagtttaggacttcgataataaagatcaatatgactcagatggaaagaaaaattgtgaaaaatttttagtgactttagtggttgaggagtaaaatttttgttgataaaaaattacgtaatttttgggtgcgttttttttcttatcttttatctccgataaggaatttgatggggtttatcactggagattgcagatattatgatggttggtggcagggtggtgctatatgagtgggtagtatgatgtttaaagaggtttgaatgtccatatttcaatggttttttgtgtttatattgctttgtaaaagttgaataaataaaacaaacggtataatgccaaggccaatcggatactgatcgggagaaccttactaccgagttactttaaatttattaagaataattattttcattttagtactaatattatacatacacctaactaatctaatcatgcttgtcattatcatcgccatggaaatgagatttgatatcctcaactgtatcttcgatggcatcttcagcttcatcgactgcattgactatcctatcccaccatgattcagattttgtaggttccttttcatcattatcgtcatgttctttatcttccttatcatcatcttccttatcatcatcttccttatcatcaccctcgttctctttgtttgaattacctttgtcttcgtgaacattatcaataggttttaatggttctaactttgcttgacactgttttctaaaaaatgaatcttcatcaataatatccactgggaatgtaacatctggataatcgtcactacatatctcactgtcatcccaaatatcttcattaccaaggtcccaattttggactccattaccataattaatttcaagagtatcacaaattaaattataaacttttggcatatcgaatggatttaaaactttctttccatctctaatactatcaaaatatttacctgtagcaataaatacaccatgtgataatgattcatcattcatgtatccattaccaacaccattatttaattcatcatttccataattaacgtgatacccaacatctggtacaatcattataggtgcgatatgttcattcattccaccgtatactttctctaattcagatttatcgtatataactctcatatgatctccaagcacgttgtcatccaatctagtatggatactttctgcaatctcttgaacttttgcatcatccttaggatatattccaactatgctatcacctgttatagctttgaatgcatttaaatcatcaattatgtcaccaatctcaataactcttgaatggtcaacaggaacataactaccttcggaaacaatcataatattagcatattctatcatattatatttttcaattaacatataaacagtctctatgaatacatcaatatcgtttaattctttaaccaaagttttcccgtttaatttcccattttgtctaatgatatgacctaatgaattaattttcattagtaaaagatttggaatataatatctttcctcattgatatcttcaccatttaaataatattctaattgtatagcttgttcctttaattcatcaatttcatgatatgagatatgctctttactactaattatatgcatccaattaaatgttaatattttcattcctgctttatgaactctatcccaaattgattcgcctatccaccattttttatcagaagaataatttttgaatatttcgtccgttgttggatcgtaaaatgtatcatcaattataccatgctgtcctggatacataccagtagataatgaccaaatattacttaaactgttggctgggttaacttgttttaagtatcttgcatagattgatttttctgaacttagaagattattcaattttggcatatttgcttcagaaatataatgtgggtttaaaccatcaattgctataacaacggttaatcttttcggagttaattcggaatcactacctggcttaagtattggagtttctgtctgatgaacaacatcatcaataattggggtagtaggttcaattgtagttgtactattatgagtttcggaaaattccactcccttagtctgttttgaaaacttaacacttaaaacaataacagtaactaataaaccaataattatagctattaaatgaccgaaaattattttagaacctttacctttattgagaaatttacactttctgtccttaccattgaaatagtcgaaatcaaaatcactaccaatactaccatttctattcatcaattcaatatcatcaatatattcgtcttcattatcattgaaattgaattgtgataatctttgaaatctagaattatttctaggaagtaagttactaatagctttccaccctttggtgaatggattagaattaccattattgaattggaaatcactcagttcatgattatggttaggatggtttagattcatatcatcaatttcttcatcgtgtatgcgaaaatcatcaatgtccccatcatctaaattagtgaccggtgtgtctattgcaaaccctccactcatacggaaacaattgtagaaatgtaggctgacttctgacaaagccccgatggagttaacgatctctttattaacttaatattaataagtaagcccaattacataatcagcgaaaaaaacatggtgattggaaatcgttattctttattaatactttcaaatacttctattcttagctcatccattgatttgatttaatttgaatttaattttatctgatttgcttttatttgaatcttcttatcgttaagagtaccagccaatcaattcactatgggtagaagaaagattgaaatacagccattgactgatgacaggaacagaactgttacttttacaaagaggaaggcaggattatttaagaaagctcatgaattatcagttttatgtcaagtggatgtctccgttataataattggtaaaaaaaataaaatctatgaatattcttcaaatcatacaaatgagatactgaatgaatataagaaaaatcagaaaaatatttatgaaattaaaactccacataattacggtgattatgaactgaaaagtagggttggtgatcacggtgaagaaactcacaatagtaatagacatgatccaataatatacactcataaacattcaagttccgtaaataatatgcaacaacgttctagtcaaagttttaaaaagagtcactcaagatcgaaaagtgataatattcaagggggtcagtttaaacaaggcttgggaaaatcaaatgataatagtatagatgacgatgacgaggatgatgatgatgatgatgatgacagtgaagatgatgaagacgataacaataataacaatgataatgaaacagttagcaacactgatatatccactaacaaacacagcgtatcagatgatatagatcaaggaccgaataaacgaattagaataaatgttgatgaggcttcatcagcttctggaatgtctccattattacctaagacgccagaaatgaaatctgataacagaacacatacattggttactccaatgtataaacgaaatagagggagtgattctcataataatgataacaaggaaaataaaaaggataaagaaaataatgccaatgttaaaagacctacactcagtttacaaattccacaagttgaagatgatttatctaaatcaaatccttcaacaataacagctgctgaatcctcaaataaatccaaggatatgtcatcaggtagtagtaaaaataatgttcattttgaagaatcttcagactctattaataatgagaatgagaaaaaaggtaatgattctattggatcaaaggaaaataaaataacaaaggaacaaatcactagtctgaagaattttaccaataacaacaaactgttatcatcaggatacccatttaattcagcttctggtaacccaataataagtactcctttagcaagttcatttttaaaagataggaaaaatttatataccccaataacgaccaattttttgaactcattgaataataatgttgatacaccaacaaatcaaatgagttattttaatttcaatggaatgtcaccaactcaattattgactcctatgttcccattcccaatgtctgcaacaaatacctcggcacctttaaatcaacttactgattcttctaataataattcaaatattgtaaataatacaaattcggaaagttctaataatttaggattgggagtagtaatgagtggtaatagtatgaataatagcaacgcaaataataatagcaatactaatatgaacaataatcccatgaacagtaatatcaacactactcccaatggcaaatccaaaagtgattctcaatttttaccaccaatgaattcagcaacttcaatgtatttcccacaaatcagaatgaatatctcaagaacaccatcgtctttattgaatacaactacatcgaaaagttcattgaacttgtctaattacaatggtagaatcaataataataacaatacaaggctagataccataaataacaaagaatcttctgtactcaactcatctatcaacaaacacgaaagaaaagatagtaatagtagtaataataataataataataatcacagcaataataacggtaaaaataatttaacagtgaaaacagatggaactccggtagaactatcaagtctctctacgggtgaattatatagcttaccatcgagatatgttgaatttcaatcacctaatacattattttcacatgattggcaattaaatagtgacggtacacctattgtaagcggggcaccaccatcagttcttactcatacattaagtacaggtattaagactaaacaatcactcaaaaatgaacttgatgaagatataaatgacactttagagggataaccacagtgtataataatgctttttacaaagttttgtatattttgtatataactaacagttttatcagtaatgtaccagatacgatccttatcttttataaaccctctcaagcgcacgtgacattattaagggctttttgatttctacttgcgcgcaccacaagcaaaattaccaaattcgattcagtgcgtcgtttttcaatatccagtgataatctttgagactgtttttcccgcgcgccctccactgggcagtcccttcttttttccccataacatactaacagatccgggcgtaatctccaattccccagtggttttgttgagaaaatatttttttcttctctacttttcattatttccactttgacctattatactctctgagaagattatacgtatttttcattattacattaaaattttagttttaatctaggaatttttaaaattatctcccttcagtagactagcatccctgactaaacatgaaggtacgtacatacatacccctatattcaatctacaaaaacgtattagtgttctattgactatactcattaaagtattcttgatctattccttgtattaaaaattaacatacaatttgaaacaaaatcaaaagtgaaaatataactttcataaagcacattataaagctactacaattatcaaaggacaatataatataacatgaaacacattcttatacttagaatcgccataacaagaacttttttcaatatatcaataaatactactataagttttaattttattcatattggaaacaatatactaacatttattatcctcttattttttgattatagttaaatattgcttacccaccaaacggtacccaaaaatgtatcgaaattgatgatgaacaaaaattaaagtcattctacgacaagagaatgggtcaagaagttgaaggtgaaaccgttggtgatgaattcaaaggttacgttttcagaattgcaggtggtaacgataaacaaggtttcccaatgaagcaaggtgttatgatcccaaacagagttaaattattattagcaaagggtcactcatgttacagacaaagaagagctggtgaaagaaagagaaagtctgtcagaggttgtattgttggtaacgatttatcagtcttagctttaactattgttaaacaaggtgaatctgaaattgaaggtttaactgatactcaagttccaaagagattaggtccaaagagagcaaacaacatcagaaaattcttcggtttaaccaaagaagatgatgttactcaattcgtcattagaagagaaatcgttaagggtgaaaaaacttacactaaagctccaaaggttcaaagattagttaccccacaaagattacaaagaaagagagctgttaaagcattaaaaattaagaatgctcaagctcaaagagaagcagcagctgaatatgcacaattattagctcaaagattacatgaaaagaaggctgaaaagattgaaatcagaaagagaagagcttcatctttaaaaaactaaatctgatttattaaatctttctttaaaattaaactagtttttccgtgttttgtatagttgaaacaaaatatcatttatttgctgttagatttttatatatctcttactttataaataatttttaagcaaaaaaaaatataattataatcttgttctatctaaattacattacttagcattataaatttaaataacttaaaaaaaaatcataccttacttctctttgacttattattattttcatcaggtgtaaataagtcttgtaaatttctataaacttgttcagttgataaattggtaccatatttaaatttcgattcatatctagccttttcttcttcatatttaggatctcttaacaacttattgatatgattttgaaacttactctctggtattaattctttagttataggacattgtaataacttctctttagtaattggatcaactttagaacctttactactatcttgttctctccttcttttcagtctggactctccagctgcctttattttaacaccctttggtactcttttatttattaaattcacttctttttcatcatcactatcatggctatcatttttatcatcttctacatattgtggtataccttcatcatcgttctctccctcgacatcctcttcgatattattatcatcagattggtaatcttcctctattctagcatcaacttcatcaaacaaacttctatgtcctttttgaactaatgatctatactctaaatcggatttattcaaaggtttgtgtagctgtgcaatctcatcaagttgtgtaaattctatggtttcaacaagatcaaattttaaccaatctatactatgatattttattctttcagctaatttcttattttcaacctctttaacttcttttctttgcttattcaaatattctgccttcttattacatctctccaaaaacttgagtttatcaatatgtgaattttcatcaacttcaatattattaattttctctggaatcttgtttttattgttccacaataaatcatattgtttatgaaacttttcatatattggatacattgaatgtttcagttccaaaaattgaaattgagccgatataccattactatcatccagtgcatatgttttaaactcttccattgcagcattaccatttactacagcaaactgagctgctaatttaataacattcaaatcatttgatgatatagagtcttcagggaaactttctctgtcactttcaacttttatgaaatcgtattcttcaggtttctccaatatctcttgatccgttgtctgtattgtttcaacattgggtatctctgcattttcagttgaagtatcaatatcttgtttgatttcgggcagttttccatttgtttttaaacagcttaaacagtattgatagtattcattatatggatcattgtcattcaaaaagataaattttgggttctttgattctttagttctaattttattttcaaaaacaacaccatttttattcacataaattgcagtcttaccgattaagacacgtacatctgctggtgggattgttatatccaacttttcattctcttttgtcccactcgtagagtctggcatgatacttttaccgttgttgttgacttcaagaaaagattggcttaacaattcaattaagtttaaagttaaaagaaaaatcatgtaagtgcatgcgccgcatattattttgtcgaagtaaatgaagtaacatgaatcgtggctagtaaataacagatcttctctgtatctctcttattcttgacgttacgataatacaaactattagtttcagtattatcaaatgaaacgaagcaattccgaatcaggtgaactaaccaatagtgaaagatatgaatatttgaaaaatgttagacttaattgcatagactctgaatacttacaacttgttaaagattttgaaaaattttatccagatcaatcacatgtattatgtgctttactacaagactcaacagatgccacaaaggctacgctaaatgaaaagtttcagttaatgtcgcaaacgaataactcaaacaaaagaatgtgtagttaaatgttgagattacacatgcaaatataaagtttataaagttaatggaaagaagaccaatgattgagtcttgtaattgtcatagatttgtttcatgatcttcacagaatactcaacatcagataaatcagcatctagttcaatgaaaagagattttgcttcttcacttacatctttaacttccttgtttaatagaaacatggtaaacaggaagtccgagaatgttaataatatatttgttttattgacgttcttgttttcaaccttcttgataaatgaaattatggtattcaatataatttcaagtgaatcttttctagttttttcaaatgtgtctgtaacgtataatttagagtaatctatatcatcaatatataataaatcatcacaaatggttagtaacaatgatgtgtaaacaaaacttgggcctgtgggaacaagtttatgatctaatgtcctttcccaaattattgtctctgttgcatcatcatctttgttaaatctttcttctaacatattggttattttagaacaaacagtctccatatatttagaatctagtattaattggaaacatttccctaaaaggggatcaattgattcagaccaattgactttaccctgtatagattgagataagtagttttccaatgtttggtatatttcatttaattgaattttctctgctaattggttcaatgtttctaaaatatagaatatttgtgtattagatagcacatttgattggaaatctagtatgtttgaaacttcactcaaaaattctgtgattagattgttcaataatttaagacttgattctgcacttcctgtgtaaatttgtttcaatttatttgataatgatatccacatttcgtcatcttcataatcatcaactgataacacgggtttcttaaccatataagaagtagattttagtaactccaatgaattattaatttctttaatattggatttgtatccattaagtaattttggaactttatcagtagtttcagttgaatttgatgtatttaagaaagagtcaatggtaaacctactaccaaactttttatattggaatgaacttgtgttggaaagatttgacaatgtggataagatctcttctttatttttgaatgttgaaataattatatttgagatatttttaaattgatttatttgattcctaacttgtgcagaatattcagtatcacatttatcaacaatataatttattatgaagccatcgtctgttggtaaagttgtcaatgatgtgaattgtttgaacgatgttaaaacgtggtttaataaaacagtcaaatccattaagttactagaggatttttcaaatctttgatcaaagttactcaacaactccagtgcgatatcagacttccagttatcaataatactttcaagtttttctttacttagctccatatcttctttgctcaattcaaatgtaaaatctgtttttaaaattatatcagaattagagaacggttcttggttaatccattttatccattcattgaaagtagtttgtttaatccaattgtaattatcagaattattcttcaatctactaaatactaaacttgaacgacttttaatattttcaatatattgtaatgtaataaaaatgtattccaacaaatcttcaaactttgcactattgtctgataaaaatttgaagtattctagacgtttgttcaatatccataaaactgtctcagtagcactaactttttgattaacaagaaatgatgcaaatatgttggtaagaaattcattatctgcttcgtgtgttaaagttactagttgtgagtctaaaagatgattaaattccttacataattgtttgtattttgttgcagaaaatgttttgcggtgttgttcaatatcattactgaaataataatcaattaaatgtatgtgtttagccacaataagaaagtttgattgtaaattttgactaagtggttgataattagcattattatcttcggcattgaaattcttaatacttttatcattcttatttgattcacttgataataaatttgcatttgatgaagacttcaattcatcttttatatcgtgttttaattgcattaataaataatttaaatcatgtactacattctgtagaataattggtctattcgttgtcactgccttttgtaattttgcattttcaacattttgattgaatttaattaaattgtctaaggattttggattatagtttgacttcttgaatgcaagatccatcaatttttcattctcctgtttggtaattttgttcattgtgataatttcatcagcaacattcaagagttctctatatttattaccaactaaagttttcaattcagatcttttcataacaacatcttcagataaattattcaatatcttacctatttcatcaactgaatagtctttgaatatatcactggcagatttgcctattatattctcgtaatttgtagatacctccatccaattgtgatatgtgtgtgttatttactgaataaatcagtctaagaaatgacatgttgataaaattgaaaatacaaattgcggtgagatcaacatgttgatataaatttggtgtaaacttaaatatacggtatatcagtatgaatatactaaaccaatactctaatttacaaactatttatgtagttacagaaattatacattactatatgtatcaatctttatctttgtagtaatcacgttgacttgaaatcaatgttctatgtaattctggatttggacgtcttggatgaattaaattacatttatcaccacgttcacatctgccatgactagagaagcctttgcagatagcatcttcaaaatactgtacaggtgaaaaatcacagaacattggtttcccgttataccatctatcattacatgattggtaacatcgaaatgctgttttttcatctttaaatttgactaaaacattaccacctatatgaggattaaagttcccacatatcaatataccatcaatttcaccaaaatttaatgatagttcaacaaataaatcttgatataacctatcagtttcagactttaaataattttcatcaatatcaactttaattgtcacaaatccatcatttgaatcatctattatatctgcttgtttagataatggacctctaccgtaataagttcttataggattattaaatattttccaaaacaccacggtcttggatcttgttggccttttatgtattttagcacacttattaccatgtctacatgatccaactttagaccaaaattgacattcgtttaacttagttccatttggtacaaaattattttggtaattcctacttaccacagctgtattattttcactcattaggtatgtattattcttctctgattgtttgtatagtcctaaaggatgctgtgacaaccagaagaacaaagagtaaaagcttagttgaatcaacagacgcgactttaaacgtggtagtcatttatgtgggatgatttcatgatctcacatttaaaagtctacatgcacatgatggtaatcaaactttttactattcgaacttggtattatgttaaatacatactctatataatgatagtgatgaccggaaaattatgaaaaaaaaagtgtaacctaattgataataataaaaaatgtgaaaaaataataaacaaaaaacaaaaactaaaaaataaagataaaaaaaactgaaatgcaactcatgataataaaaaacaccaaacaacaaatgtaaataaagtctgtaacaagtaatagtatttgtagataacaatttggtctacaaatctatattataatactaatgaatccaaaagagtgatgcttttatatgcccaaataaagacttctaatttatcctttctaatgatatctataacaataactttttttttaaaaaatcaaaatccttaaaccatattactagctctttcttctattaatgacgaaccattaatatcactttcttctttatattttctttcataattttgtttagtaacatcaacttcaccgtgtaattcttcagctaattgttctaaagtctttctcttggtttcaggaatacataaagaagtgaaaatacctaacatcataaataatgcaaaaatttccataacatgatttaaccaacaaccttttggtaaaccttttgcttcacaaccgtgatcttttaatgtaccaatacaactttgagctagaattgcaccaactttacctgaagctgcagacataccatgagcagttgatctgtatctagttgggtaacattcaccaggaacaataaaagtagtagtatttggaccaaaattttgaaaaaattgtgcaacgatataaagacctaatctaccaccggaaccaattttatcataaccaaaaccaattgcgcagaaaagagctgttaaaataatgaaacccataatttgaattggttttctacctatcgtatcaactgttgcaactgtaaaccaataacctggaattgtacctgcacaaactaaaattaaattacctgcagcttggtgatataatgattcataaatattatcatttttagcaaaaccaatagattctaaaattgaagcggtatttaaaccaagaccataatatgcaacatccaacatgaaccaagaaccagcagtacctaataaaatcttaccatatttccattgaccaaaatgatggcagaaatctttgaatgatgcctttggtggagttaaatcttcaacttgttgagatgaggcatcttgacttatttctctttcacgttcaacagcatcttggttcttataatcaatattaatatttgaatcattcataattgcatcactattcttttcgttatcagcatttaactcagcatcctcggttaatgaatatcttggagattctggaatagttaatctaaaatataatgcaaccataccaggaacagcaccaaaaccaataataattctccaaatttgatcacaagctttaatacattcaccatgacaaccttcagaagatgtaacatttaatggacctttataagcagacacgcataccattgcaacaacaccggcaaggaattgaccccaaccttgatttgcaaagacagcacccataatagcacctctccatttggtaattgcaaattcagaggtaataattgaagataatgggtaatcagcaccaataccaatacccatcaaaattctataaactgttaaaattgcagggaatgaaattgcaggtgactcagcagctgtacattgtaaaatagttgcaccaatcataatcattaattcaataccataaatagcttttctacccattgcatcagctaaataaccaaaacctaattgcccaataacagtaccaacagaagttgagactttaattaaagtttcagttgatgaaggaatattacctgcccaaaagacataagctaaatatgagacacctaaattaactgagaaaatatcataagcatcagttaagaaaccaacaccaccaatcataatagttctaacatgataccaaccaaatgaagcattatcaatcgcttctaatgccagtctttttctttctaatggatcttcaacatctgcaaaatcattcataaaattatgaaatgcagcattaccaccagcagtttttttggccattgtttattatttatttatttgttattgaagaaaaaataaatttggagggattaagaagattttaaaataagaatcagttaaatctctcttttaaagcaatagaaagagataaacaaaatcaaatgttaaagaatgcagaaaacctttactttttaaaaggccttaaaaaaatttataataaaaagaaactgagaaattatgacttactgaaatataatttcttttttcacaaaattaagttagtttttgtttgcggcgttttttaatatttttttttctaattttaaaaaagccgcagtggcacagcctttaaataggcttaatttaagggtcctatgatagcgatgagttattggtattcattgaagtggtagtaggaaggtagaacaacataacaataagagaaatatgaaccaatatacactatttcatgtagtaattttgaaatagacttatcaattaggctcacaagaccaaatgtgtcaaaaaatgcgtcaaaaccgtttatagtgaaattctttgttagttatccttttttaggtcacccatctttccatttcaggaaggggttccttatctctggatttaatttattatttcagttgattgataagaaactgattaggatctgacggaatcaatcattcaaataacaatgggatgattcagatcgaaaggtcaaaaattatagattaaaaatatattattttaaacggactttattaagtataaaattttatagtaaataagaaatgaataagagtaaaagaagattataaattaaattttggaaatattaaatgtttagcgtttaaacggattcagccattttttcttcatcgtcagatggaattgaacgatgaacttgtttagtaatatcaacttcaccatgtaattcttcagaaatttcttctaaagtctttctcttagtttctgggacacataaagtagtacccatacctaacaacataaataatgcaaaaatttccataacatggtttaagtaacaaccatttggtaaacccttttctttacaaccgtgattttgtaaagtaccaatacaagtttgtgcaatgattgcaccaattttacctgaagctgcggacagaccatgagcagttgatctgtatctagttggaaaacattcacctggaataataaaagtagtagtatttggaccgaaattttggaataattgacataaaatgtaaagagctaataaaccaccttcagttaatttatggtaagcaaaaccaattacacagaaaagcatagttaagattgcaaaaccccaaaattgaacaaattttctacctaatgtatcaatagttaaaactgataaccaataacctggaatagtaccagcacaaactaaaattaaattacctgcggcttgattgtataaggaatggtaaacattctgtgatgatgcaaaaccaatagtttttaaaatatttgcagagttaagacctaaaccatagaaagcaacatctaacataaaccaagagccagcagtacctaataaaatcttaccatatctccattgaccgaaatgagcccagaaatctttccaagaagcctttggtgggacataatttaatctttcatctctagtttcatgttgagctaaatattcaacatcacctttatcagcattacctaattcacctgaaacgaatttaccagtatctgcagctgctttaccaatttcatttgagacatcaaaagtatatcttggagattctggaattgttaatctaaagtataaagcaattaaacctggaacagcaccaaaaccgataacaattctccacatttgatcacaagctttcatacatttttgatcacatgaagcagaagaagcaacatcaagatcatgtttgtaaccagcaatacatacaatagcaacaataccacctaataattgaccccaaccttgattagcaaaaacggcacccataatagcacctctccatttagttgtagcaaattcagaagtgataatagaagataatggataatcaccaccgataccaatacccataataattctgtaaaaagttaagatagcagcaaaattgatagcttcagagtgaccagcagtacattgtaaaatagttgcagcaatcataataattaattcaacaccataaatagcttttctaccaacaacatcagccaaccaaccaaaaccaacttgaccaagaacagtaccaacagaagttgaaactttgattaaagtttcagttgatgaaggaattttaccattccaaaaaacatgagcaatcattggaactgccatgttaattgcaaaaatatcataagaatcagtcatgaaaccaacaccggcaaccataatagctctaatatgataccaactaaaatcagcattatcaattttttctagagccagtctctttctttctaatggatcttcaacatcagcaaaatcattaataaaattgtggaacgcagcgttaccaccagcagttttataaccttgagcaggagcagtagccatctttataatatattagttgtttatttaatttgttaattggataataatagaaaagataatttaattaattaatgaaatttattaatttgatagttgttttaaaacttattattaaacaaacttgaatgagacttgtctgataaaagaagagaagaaaaaaataatgtaagataaaataaatgataaagaataaagtagaattagggatgaatacaatatattttttaaaacaggaatctacatcatctttataaaactctggtgtgatgtgtatttaatacagaatataatatgaatttgacatatttaaactgaacaacgtgctgacagtaaattaagatacagatacaataaaactattattcaataaatttactacaaacagaacgtggtattctccttagtagaccacttgttcggagtttctctcaattctatcaattatatcacttctaccaagccaccttcttagtcccctaggtatctaatcaggtaatgtgcggcttaatttcttttttcccttttctttctttgatgttacagccgtgctactaattccatcgcacgtgggaccctcaattgggtaatcggaagaggttactattatagtaattttaagtagtaatccactataaccgcggccagtaattgaaattataagtttaaaaaaaaaattaattaggtggccacgtgggttccatattgggtaagctgcggctttatattataatctgttctgcggctcttctccctttattcttattctataaaaagaaagaaacgtctcttttttttaattttatactgctacacgtgggggtgcctctgtcgcgattaaattgaatcatcttttatactcagattgtataccggcgggccgtttattaattacgtaatcaggtcacgtgcttatataattttggaatagacgcgtcgacttaaaatcttacaacgattatcatgtcataaatttgtaacataaattacgtaataattttttatcatgaattaagcctaaattataaacattgattaatgctcagttggaggagaatcattgattttgattgatcataatgtgatttttttaatttaatctttctaaatttatcttaaccaatcgattattcaaccatgccgaattgggatgaaataattagatcagtttatcatagtgatgatgatcaatctgaggacgatgatcattttcaacaaagatttaaccttgatccaaattttaattttgaaagtattcgttttgctggtaatggtggttttcctggttttcctggaatgccaggtattccaggtatgccaggttttggcggtgattacgacgatgatgatgatgaggatggtaatgttatttacatggaacaatcaactggtaaaaaattagaaaaagaattcgattataattcaaattctaatattaaaaaaaaatatacttgtaaagatacagatttaaataattataaaaattctaaaatttcaaaagaattaacaaatcaattattaaaaattccaactttaaaatattgggaacatagatttgaaatgttaacttttagatcaattttttgtgcattatctgataatcataaatattatcaatattttttacctcaatcatttgttgcttatccttcaaattatgatcatgttaatgatactatttttaatagaaatttttatactgaacaagaaattgataaaacaaatggtcataatggtcatatttgtgcaaaagcaattccaaaaggtcattttgtttataattgttatgattgtggtgttgatccaacttgttgtttatgtgaaaattgttttaataaagaagaacattcagatcataatgttagtgtccatagatcaagtggtgatgcaatttgtgattgtggtgatgaaacttcttggaataaaaatttagattgtaaggcaaatttattacaaaataaattaaaatcaactctaaaacctttacctgaagaatttaaaaaaaatattaaaattattataagaactttatttgattttattcttgatgctaatttaactaatttccattcattgccatttgataaaaatcctgctttatcatgtgattattttaaagattcaaatttaattaatcaagatattttaaatgaagtttcaaaattgaaaaatttacctgattataatgataatgttgatacttataaatataaatatgctgaaagggatgaaactggtaattgtgaagatttttgtacaactggtgatttcttagattataaatatttaattgtttggaatgatgaatttcataatttccaagaagctcaatatttcctttcattagctcatgttccaacaacttctgatgaggatgaagatagtccattctctgaaatggatcatttaagtcgttattcacttgatttatctggtgatatagtttctgcattagctgaaacaattgataatgaaggttttgtttgttatgcaagaaataaagatattaataaattaattgaaaaatctaaaaaatttgattcctataatagaggggttagtggtttaactcctttacatcattcaattatgactggtaaagaatatgccaatatgattatttctcgttcaattattaaatggtttgagttcatacttaaaaataaaaatactttattaactgattttattagacaagaattatcaaatactttatttgaaagtgctaatttccatttaaaagatttatctgctttaaataaattgaatattatgaatagttatttaacaactgataaattaacaattcctcaacctgttatgaaatttatgtacagtgattatacaactttcccgatttcgattgaggaaattgatcctcagttcgatgatgatgatatagagttttttggtattaaaaattgttcaagattacaatatctattctttttcgaaatgagattcccaaaatcaatgagacaaattattaaatcatcaattattccaacaatttcaaataactcacagtcaagatttgaatttgctaaacaagttgtaagagttttaccaacaattgaatataatgtagcttttcatgatagagaatggagattaagtttagttgaaacttttagattacaagtttatcatgaccctcaattaggtacaaaattattagatttgggttattttgatcatataattgaaagtattttcacagttttaattaattcacaatgtttaagaaaacaaaaatttcatctagaggatgaaccaacttggcaatatagaagagtttcaaaacttttaacttatgcatttcaaggttttgatacccttttacagtttattgaaaagggtaatgacaaattatttaaagttccatttttcattaaaatttttagattatatgttggttatgataagctttatccaatggttagaaaatctgatgttcaccaagaatttgataataattcagcttgtgctacaactcatgcagttgcatctccattatataaaattgctgaaaatttaggtgccattattaataaaattaatcgtaaacatgaagatattgaaaaatttattgttttagtttcaagttatttgaaaattgaagaaaggaaaaagaaaactattgaatcagatagtaaagttgaggttattgattttaatattgttaaagatggtgtttcagtcattcatcctattggttccttattagctcatttaaccaaaaattacaaattttacaaaccagaattattattagaatcaattttatctgttcatacttttggtccttatgatgaaagatttgttgaattagaacgtaaatctacattaaccaatttcatgggtgttgctgatgaaatgttacaaccattagtttttagtgcacaatatagaactaatttttggattagaaatggtgatgaagcttttattgcacatgcaattagtgatgcttacaaacaagaaaataatttttatattgttcaacaaggtattttattaaatcaattaccaattgaagatatcattgatagatttatgttaaccggttgtttctataacgatgaaagttttgataaaacaatttatgaagaaaaaattacaatgattttaactgaatttttacaattaatgtatcatttattaacatttagacattattatgattctaatttatcatatgaaaaatgtaacgatattttagataaatatcatgtttgtgacttacttactaaaggtccaagaaaatattctgaaattcatgctaattgtataacaactgttaaacttgatgaagttcttgaagaagttgccgattatattccaccaacctctcataatgattatggacattataaattaaaggatgaatatgttacatcatttgatccatatctatattactattcaaaaacttcaacatctgaaactgaagaatcattggttaaattaattgctgaattaaaaaataaaaatcaaaatgatgttgttcttactccttatttatatcaattaaagggtaaagatttagctaaatttaagaaaattggtgaatttatgagaagtaaaaaatttgttaaaattttatacaaaatgttaagattagcagttaattcagaaaatgattcacatttaaatatgacattacaattgattcatgcaattattcttgatgatgaattatataataaagaacaacataatttgaaaaattttgttcaaattccaatttgtaatttattattaacagcggctgaaaacaatgaaactccaaaatatgttactaaaaaagcatcagttatattagaaaaattattactaaaggatgatgatgttctcaattcattaatggattgttttggtagtgatcatgttgaagaatataaaaaatcatctcatggtaaaactctagaaacaaaagttgaaagaaaaagaaggttagcacttaaacgccaaaagaaagttatgaaaaagatgatgaaacaacaacaagattttgcagataataacacaattgatgatgaagatgaagatatgggtattactgatggtgataataaatcaagaattactggtgaaggttccgatattaattcaggtgatgcaactgctaataaatctaataattatgcaaaaattgaaagtagatgttgtatcctttgtaaaaatccagaaaatcaagaatctctatttggtgttcctggtttaattactgtttcatctgcattttggacaattccaacagttgatgataaggctccttcgttcatggttgaagaatttgctgaatgttcttctagttatattgaaattcataaagatttgaaaagagcatcttgtgtaagagataagatggttattaatggttgtcctcatggtatgcattataaatgttttaaaaatatgattcatgaaaaacgtatgaagagtacaaattttgcttgtccattatgtaagggtaaattcaatgcatttattccatcatttaaatcaaatgagttcgaaatgaaggttgacccacatccagattataaaggtctctatgaagagttagatttcttagtaactgaacatactggtggaaatcttgatgaattaagagaaaaaatttttgatgaatcatttcaagatattttagaaaattcaaataatgagaagaataaggctttggccattgaattaaaagatttgaataataaaaactatttcttgaagagaagtttaccagtgtttaagcaaatgtctaaatatttttacagggatttagcacataattcctatctacattatagtatgtcattacttattggatcaacaattcaactacaggaaataaatgatagacgtgatggatgtgttaatgagacttttgaattacctgaaattctgcgtaatactttaatgtcattattccaatatagagttttaatgaagagtttgaaatgtgaagaagataaaggaagtgaagaattttttgaatttttagctgctaatccatatcttggattttctgaaacgttaattttaatgcttactgaaactcgtatgccatatcaacattgtatttcatatgcaagtctgaaagtacttgtatatacaatcgtttcagtaattcaaagatatgaagttaatccggataatttgaaaattaactcacttttgatcaataaaaatgttgagctttattacaatagtgtgagtgatttgtgcgtccaagttaaggaatatttacttaaacatggtgaaacggataaattaactgatgaagattatgatcaaattaccgatatagttagtcgtatctatatgactaatcataaatcttatctaagacaaacacattacattttaaaattattgaatattgaatatgaagctgaaatttcagcagtagatttgggtagtgctgctgattatgctaggttaccatttgcacctgatagtaaattttttaaacaacttcttggatcattgaaagttttcacaaaagaaaaggaattacctgcaactcatcgtaaagactatgaaattgatattattgattatccaaaatcacctcgttttattgatttaccattacaattaaaagatattgcacttgaaagtactaaccaaaagcaaattgttggtagtagggatgaatatggtgaaccaatttcagttttcaagaaatgtaaatatatttgtttgcactgtggtgaatggctttatgaaacatcaagtcatcaaagatcatgtgaattaagtggttattcaacactatatttttcaccaatgaagaatataattagattaaaattttcaccgttaataacaaatcaagaatttactattgaatcaccatatttaaataaacatggagaaccatcaaatggtttaattggatatggtgatgctggtacattaagtaaaacaagatatgaaattttacaaaagaaatggtttaatcaatcattaattactacatcatatagagaaatgattgcagttaacgttcttagggataatgaaaatcatttattcccaggtattctagaaacagttggtggagttgaagatagaagtcatatggatatgatttcagaacgtaatgcagcacttgctagaatgttaggatatcaaccaggaatggcaacaacaactgatatggatggtcgaccagatccagcaataatgtttgaaatattacgtaataatatgatgggaccagaatttgatgaagatgaacgtgatagtgaagaaggtgaaatcatcaatggtggatttatggatttcggtgaaggtattgatgttagagcaggtattcctaatcctggtagagaaatttttggtaatttcttccaagcagttattgatagaaatgatgaggaagatgacgaggatgatgaagatgatgaaagtgataattcagctctccactggtgatttacttaaatgtctagatataatagataaatagtttttatagtagtaattacaagttatttttagtaaacagtttagtaattctggtaagaatagccacagcaatagttggtgtgtgcctcctatataatataaattaatagagattttacagcgataccgttacatgaaaaagtgggggtgtggctcaacacggtaattaaaatttttgttaacagaattattttcatgttgactttttgtttattatgctgaacagatgtttctgtgtgtacttgtcaatagataataataggtgtggttggcgatgggcattacagaacattcttatttttaaattgtggtttttaaattattgtgttgattcaatctcattaattctctgttggtggaaattgtataaaaagaccctggatgtcgtttcttgcaaatgtcgatgatactcatttaaattagtttatcatttggcatctactaagaaaaccaaaggatatatacaatgataaatgtattcaaaagtaattcaaaagatgaatcatcatctctacattcttctactgattatataggggaagctgaatctgataatattgatgttaatagtgaatttattgagagtattgataattcggatattccaacacctgaagaaaaagtcagtccgttgggttattcagttaattcgtttagtattgttattttagttttacaaggtattgttggtacaggtattttcagtacacctggttcaattttaaaatcaatgggatcaattggttcaacgtatgttttatggttaacttgttttttattacctcttttcagtacattcctgtatattgaatttgcaggttattttccaaaaagaaatggtggtgatgttgcatatttagaacaagcatatccaaaacctaaatttttaataccaacagtctttgctgctgtctctgttgttttatcatttacaacaagttctgctttagcatttggtcaatatattttatcagctgctgaaattgaagctaaaacttggtattatcgtggtattgcaatcggtattttaactttcactgcattatgtattgcattaagtactaaatggtcattaagattgcaaaatttattaggttttgttaaagttgttttcatgttatttatggttattttaggttgggttattttatctggtaaaactaaagttcaagatccacatcaaagtttccgtaatgtttgggaaggtacaactactaatggtaataatattgcaaattcaattattaaagtaacattttcttatagtggttattattatgcatttggtgttgttgcagaatttaaaggtaatgaaaatgccaatagtaaggaagaaagaaagaaacaaatgcttaaaactttttcatggtatgttccattatcattatttgtcatttatgttttatatattttaatgattacagcatattatgcatctgcatcacctgaagaaattaaaggatctggtaattctgttgcaacacttttatttaaaaatgcatttgaaaataaagcggcaacaaaggcattatctgcaatggttgcgttatcagcatttggtcatttaattacagcagttttatcacattcaagagctttacgtgaatgtggtagacaaggggttttaccattcccaaaattttggacttcaacaaaaccttttggtactccattaggtccaattttcattacttggttagttaattttattatgattgttgcaccacctgcaggttcagcttataattttattgttgatatgggtacttattcaaattatatttttacattacttttagttgttggtttattaagagttagaagagatagaaaattaaaaggtttaggtacaaagggtcaatatttaccattaccatgtattattattttaatattatttgaattaatggttattgcaattgcatttgttccaccaaagggtacattaattggaagtgatgttacatttttttatgcaacttatccaattgttacaattggtattttgggattttgtgtttcatattatgcagtttggcgttatgcattaccaaaaattggtaattatgtacatcgtgaagttatttataaacttgaaagtggtgaaattggtaatacagttgttaaagttaaaattgatgaacttgaagaatgggatagagttcataatacagattctaatggggttggtgttgcaaaagatttaggtgatgttgcagaaaatgatgttgaagttaacattgaaaaaattgaatcaagtaagagttaatgaactattttttcaattaagagttttctttttatttaatttgtacatatttttgaaaaataataaaagtttctctatattaaagtaagaaaaaggtatataacaaagaaaaatattgaaaaatcgttaaacgggtatcgtagttgtagtttcaccaattaatgaaccaatactttctctacctaaaattaaaagattattctttctatttgcactggttttattgaaaaattgtccctttgcttcatcccaatcaccaactgttattctttgtaaattttcatctctcaaaattcctttcctatttaattttggtgaattaatttcctctggatccataaaaatatctaatcttggtgaagcaaaataaataattgttgatctagtaaaacctcgttgatccgctggagctgtatgaactctatgaacagaagatttaaaatatcctccagttataaatttcattgtatcaccaatattaacaattaatgcatcaggcgtatgtgaaacatatttccatttattatcatcatatgtacgaacttgtaatgaaagaattgattgtgataaaatataagtgagaccaccagcatcggtgtgacctcttaaccaagttgaagaagttttattattataatcatcattaactggatgatatagtaaaaatctaccaaatcctgtacctgattctcttgttttgttttcaataactttaaaatatttattgtataattcaccttcaggtaattctaaaataatatccattaatgttaacacttttctttgaatttcagtatgtaagaaactaaaatagtcttgaatttcacttaaattttccttaacaaattcagggtatttaattttattgttgaaaattttaggatgattaaaatgacggaaattataaaattcaacattatctttagtttcatttgtataagtccaataaccacgaggtttaaaacctgtacctctaataacacctaattctaaacccttatcttcatcaataatatcttttcctgcaaagaaatttgcctttacttcatcagttgtttcaaaagttgattgacatattgatttcatagtctctaaaaattcatgagaaattccatgattaattaatttgaaaaatccgtactctgttaatgatttctctaattgatttgcaagttcttttcttgcttcaatacctttatcaaactttgataaatcaataagtgcaatatctaaagtatcaataacttcctttgaaggtggtgcttcaataaaaggacggaaattatatttttttctaatatcttccttagtactcatttatcaaattggttaacaaaactgtggtagcagcttcgcagttgcccaaaaaggtgcaactagtccccatttatatacatattacacacaaatgactcatctcttatcagataccacactgataacatccgataagatactttatgatggttaaaacaagggcaaaccaatgagaggcagaaaagtagaaatgcatccacaatagtcaccatagttaacgacgagccaccacattcttatcgaaaaagccactgttttcacactttattttatagttatctgtctgttgtctgttataagcgttatcggcggttgtgtggctaattcatagatatgtaggtaattagataagtagataggtagattatctagtgttaaaattgtggttttagaatggggtaattgtgggtttgaataaggaaaattgtagataaaaggttaaaatgttccttattgccaaagtataatctgcagtccgtaattcttagccgtatcacagatcagggaaatatggtttggagctttatcccacatagaagatacttgtctgaagatttagttgagcccttattggacactcaatcagatactgaaattgaaattaatgttaatacaattaatattgaagaaaaaactgatgaaaaaaattatgaaaagggtgttattgagtcagatactgatttagataaaccatcaactaatgaatcaaatgattattataaatttgaagattctgatggtaaaacatatgaaattagagaatttagagatgaagcagatagatcaatttggagatttttcgatgaatttgaatatagagaaacgaaggaagaatctgctaattataaatggtataaatggttccctgatggtacaactagtattgaaaaaaaacttttatttaaattagatattttaattgcattttattcatttattggatattgggttaaatatattgatagcgcaaatttgaataatgcatatgtttcaggtatgaaagaagatattggaatggttggtaatgaccttattaatacacaagttttattcactgttggacaaattgttatggaagttttttggttatttgcattacagaaagtccctgttgtttatgcattatttggatctgaactgtgttggtcagccttcactttaggtacatataaaattaataatgttaaatcattaaaggcaattagatttttagttggtgcaagtgaagcagcatatttcccatgtattcattatttattaggtaattggtatttaccaagtgaagttggtagacgtggagcagttttctatggaggacaatttttaggtgttttaacatcaggattattacaaagtgcaacatttagaaatttatcaggtattcatggattagagggttggagatggatgtttattgttgatggttgtttatcatttgcagttgcaattttagcatatatttgtgttcctggtataccatcaaaatgttattcaatttttttaacagatgatgaaattaggttagctagaaagagaatgattaagaatggtacagatttatcaactaaatcatcaccaatttttgatttaaaggtttggaaaaaagcatttagtacatggcatatttatctattaggatttactaatatgttgggatttaatactaataatacatcatcaggatcatttgttttatggttaaaatcattagataaatattcaattggaatgattaatgatttatcaactgtaccacctgcattaggtattttatatgttttaataatttgtgttggagcagatattacaaggaaaagatttttatttattataatttcatttttaatgaatttccttggtaatataattttggcaatttgggatgtttcatatggtgctaaatggtttgcattttgttttgggtattggtcatggtcacaatcatcagttttcaatccattaattagtgattttttccgtaaagatgcagaagttaaaactgttggatggatggttatttatattattggattacaatcgagtgcatggatatctaaattaatttggccaactgttgatagtccaaggtataaagttgggttctcaacatgtgcaggttttagtattggattctgtattatgatggtaattgcatatttcctatataagagagatgaaagaagagaggcattggagaatggtatctatgtgtacaatagtaatacagacactgttccatccttcattactgatcgtattgatagtaaataatataaaaaaatataaaataactcttttaaataactctttataactcttataaaataatcatgtacccaaacacgacaaaacgcatgtcatggtaaaaatttcatactatgtaaaccaatcagagtgttggaattgctaagttccctctctcgcgccatagtaattatctcttagttgaaatactccactgtgaagagtcgatgttaataagaagttcttattactttaggaattggtatatctgtatcgacaatgtacactcaaatctacaacttgatcttcaagagaaactccacctttgttgcaactgtttttgcttcaactttcttattccaagtcggtttagatgaaaccgttacttcatggtacgaagctagaaataaaggtaaactttggtctgatttaaaaccaaaaattttagctggttttgaatctgaagaagatgaagaataaatgtgttggtatatataccatcatatctctttatttatttatctatttaattatttaaatcaagaaatgtttaattcctttatatattacaataccaatataaaaattcatattagttagttaatctttattttacaagagttgattgttgttatacatgtatttatttattatttattatctattaatcattatttatcctcatttaacaacaatcatttgtccaatatcatcatcatcatcgctttcatcttcatcttcatcttccttttcattaacatcaatctcttcaatcttttctaacatatccttaatctcatttaattcctcctctttatccttttcttcaccttcatctctcattaacatttgaactaatctatcacataattctgcaagtttttcttcattgctttccttatgtaattccctaattaatggataaacacttttctctcttaaaaattctctaccttgtcttgttgaacataataaaagtaaactctctaaatgaacacaaattatatcctttaatggttccatctttttatcttcatctaaaaattgtaattcatctggtaattctaaaatttcttcatcacttaatcctttattacctggtaatgcaattggtcctaaaatataaattaataaattaattggttcatctaaaaataacatatgtttctcaatatcaaataatgaattcttaatagttgatgcaaccccctctcttctaacttttgcatcatatttttcagtgaaaactaataatttagttaatggtataatattatcatattcttgttcagtaacaaaatattcacgtcctttcttaaatcttgataaatctgcaaaaaaatatgataaataatcataaacaacatatttattaatttgtctttcactacctttaacaaacatatccattaaacaatcaatagctttatcacttttgaaaatttccttttgtgaatctaaaatattgattttaatatcaaaaacttttaatatattatcatttttagctaagttagctaataatatacacattaattcaccattaatattaactggatttggtaattgttcaataataaattttaaaaattctgtatctttacaaattaattcacgtaatttttcatcatcacataaattaactaatattgttaatgcttcattaactgttttacctttcttttcgtgtgttaatttgattaaatcttcaattgctctacaattatcatatttgaaaatttcttgttgattatttggtccaccagctgaaaattgaactaaattttcaagtgcaatctctctgacatttaatgcattatcatgtaaaaatccaacaagttcctcgagttcacttggcatcttgactatagtttatactttgttatcagaactattatattacaaaaacttaaaggtataaaaactataaaaatttaaaaaaatatttttttttgccaatcttgaaaaaattcatgtcgtcacagttaacaaaaaattactaatattactcttttctgtgaacttgcttattttgcagtgtaaaattgtcctttaatatcttctttaatgtatgtttggattcaggatcacgttgcatcttaggacgtaatgccttgaccaatgctgacaggtcaattggtccattaactaataattcatcaatatctgcctttgtaagcttatcaggattaatactattattttcattattttcatccttgattattggatctttaacgtcttcatatgttatatctctgtgaattgcagttctaggattccattctccaatagggaatttacttaatatacttttaacagctttaattgtaataaatccactacgataattatcaacataaattttcttatcattcttctttctcttctttcttggactttcagttgtattattagtattattattatcatcattgaaatcatcagttggttctgatttaactttaatttcaccttcagtaggttctgttttaactttaacttcatcttcatcactcttattttcaatatcactatctgataaatatggattttcatcatcatcactcgcataaacttcattcattgcatttttacttaatgccattcttaatcttttactttctttatcttcaggttttacatcaaataaatcatccatatcttcatcatcatcttcctcaattgggattttttcaattaaattatttgcacttaacatttcctttttcatctttgattcaattattttcttttcttcatcaggtccttccataattggtgcttcttcatcatcttgaaattcatcatcaaaatctaaatcttcatcttcatcagattttttaataccattaatatcatcttcatcatcttcaattgttaaatcattttcacctttaatttttggtacttttctatatcttaaatcaactcttttaccagttgttgcttcatctaacatttttctcattaaccatctttgacctgaactaccttgtttcattttagcttcagcttcctctaatgttaaagttgcatatttatttcttgatgtaaatttataaaatttttcaattggagctaatttaaaacatttattttccttatctaatacaagcatacaataattatcacttaaacctgcttcaaaattaccaacccatgcttgacttgcatcataatcttctaaaatccatggataaaattcttcatatcttaatttcctctttgcttcattataaactttaacttgttttgttctcttttgaaatggttgtctctttttctttcttgcaccaccatcaggtgcaattgcttgtaattttttctccttttcaagttctttctcctttaattgtttcattttccttttatcttcctcatatgcaattctatcttcttcatttaatccttcaatttctaattcttcatcaatttcttcatttgttaaattatgtttacctgttctttgaacaaattcttctcttttcttaacttgttcctgtgccttttgttgatcaactttccttttctcatctaattccttcaatgacatttggaattgtaaattttttggatctttcctatgtaatctagttggtggttcaaaatcaactaatggatcaatttttttagcactatgaaattttaaaatatgatatcttgtctcatcaatttcttcctccgtactagccattaaggggaaaacatcatattccaccggtggatttgatctgttcatctttgctaggttattaaaagatgcttataaacaaaaagtgaattcaaagtggcatttaatgttaaaattcatgttaatagttaatatagcgaattgtttaaaagttttcatttggtggatctttcattattatttcttttgggatggttagttatcaacatgttttatatgggtatatcatcaattgagtggtggatagagatgtttaatgattggaaattgatagcatcaaatattcagagatttaaagacaaataaaaatgttcaagtgtaggtatagataatacggaggatgattagtagtgaagtacatttcttaatactataagtttttgtaaaagtaactctttaggtaacaaaatgtaattgagagcttcttagtaatctcttttacttataattgtatgcaatacacaatgatatgaatgtaataaaactactgtaaaagactatcttaattaaagttgaaaaatacaaagtgattttttcttagttgagactctgtaaccattaacttagtgaaacacttcttccaattgacaatgaatcaagataaaagacagatattcacaccttctaaaatacataatgataaaatactagactactataaagatatttcatgtcttatatttggatcagcatgtggaattctacaattaaaagcaattaatggtttaatttatttcttattaacttcattcatgtcaagtttattatttcattgggcaatgattacatttagaaataagcaatataaatatggattaaaagatttttatattaatcctataagtgaagtttatttaggtaatattggtaaacaaattgcaattttcacaatgatgtggtgtctattatctgcattaatttcataaatttgttaaattttcaagtaataatgatgaacataatgatgaataagctagtattttatctaattctaattcatcatcatcactattagtactatcattattaattgtacttgatttgagagaatttgttttgaaattaagatatgctaatgaatttaatgcatcctttgcctcctttgatttactaacatcaatttcaccattttcaacttttcttagaaattcaattgctttttgtagtttggatgatatatgattaagagaatttgaaatctccttattgttatttgattgaattgtctttgaagatgtttcatatgttgatattgtaatattctcagattgaagtaattttaattgatagtttattatactggtttcagttggtattaatggctttatatttatataatttgataatttatctatagatgtaatattatctaaatcttgaactgtcatcaatactaaattatcagtattttgattgatattttgtagattcgatattatcgtatttgaatcaaattttatattaccacaatcaattatatagaacccaattaactctaaatatccattcccatatatctctgataataaatctaaatgatgtttaagtttatcattatctattattgattgataatctgaatcaaatgaatttaataatgatattgaattattgattttattaaatttacctaatattaacccacatatttgacttgttgttatatttgatacttgtatacggttataatgatctgatattgacagtaataaagttggatgtatcaatgcttcagtcattatatcttggtatatgtctattagaaaaaacaacaatttgtctataagagaaaaacttacatgctcttaaagattgtaaaagatttttgaatcttttatggttatttgttgtacatgtaatattataagttgagttaacttgttacaaatttattacatatagtaaagcagtaaaagtagggtatatgtgtatataaaaaattattcaaaaggaagtatcaattaatcttccataatgatatcatcaacatcttcaacgattggctgttgattattaaaatttagagaatcgtagtaattatcatcatactggtaataggatccataactactcatattatcacgtaagtatttctctctctcagctaatctattcaattcttcctcatcatcatccatcatcatatcactgtcttcatattgaaattgttcttgattatattgtagatcttcattatgaggtaattctgtgatttgattacttgtgtaatgtttctttaaccatttttcataattatcccaaacaattttcaatggattataatatttaattaatgaaaaatattttgctaaataatcttcccatattaatttgtatattatatcattaatatctttattttccttattatttgatttatattgtgataatatattattccaagctttctttaaatctaatccagatgaaattattaatttatctaatcctgccttctttaaatcatttaattgtaatttttcaccaataaggtctaattgatcaggattttcatgtaagaattgatcaatattccttataatgactttattaggatcattcattgaagcgtttatttgttccggagtatatgttccaaacaatggtttcctccttgatttattattaccaaatcctaaagataatccattgagatgatcaactaatctccttttcactggatgatgatgagtgtcaaatgtatcataagtttccaaatgtctcttgtgtgtggtgtcctgtgtgtggtattcaaacattgatatggtaaatatccaatcccttgttttattcctttcttctctccaaacagattaaatcttctttaaagacgtttaaacagagtcgtttctttttcccagtggaaaattcgagaaattttttactatgggtcgctttacctgcctttttagggtaactatctctatctatacatggatggtttatctgttggtgatgatagcaatggtagtatttgatcttcaatatactatctataatatacaattattaactatataacgcccttttcccattcttttctctcctcttgtatagtcttaaaactaccatttccaaaactatccttcatcccccaccatctaaacaatgaatgctttaatataacattaattatcccatattctcttaataaacaaactaatatgtaataacatgtggctaatgtacctccaagtagtaatccaactataacttgattccaattatgatattcaaatataattctacttgcaacaacaattgcaactaacaatccactaccaattgtataaaccatcttctcaattctattcaaaccttttggccaattctttatatacatgaaaaatacataaacaaaccaaaatgacataaattgtgaatgtgaacttggcatcccccatactaatcctccatcctttttaaatatttgtccattaattggacgtggatatttaactaaatttttcaaaataccactaattatatcattacatacatgaccagctgcgaatatacatggttcaatctctcttgttatcatatgccatgaaaataaaaatactaatattagtattggcattaatgaacttgcagctaatggtaatgaccaagcattatcaggtgagtataagatatatgtatgatcaaatggaacaagggttatgtctttaatactcatttgcttggtattggttataaagaaagaagagcctgcatcgatccaatcttgaatttcaaaacacgtaaaaatcatcaacatgattttttggaatttttcaaatttatattcacttttttcttcttatcaatgaaacaatgtcccttgataatagaatacgttcacttaatgatccggatatctcaacaaatgatttattaactactttaaacacattgcactctcaaaaatcattcacaaataatcaatcaatccaactatgttccatactattaaataaaataattccacaaacttttaaattattgaacaatcagtcacaaaatgtcatttatgacttattatctaataaaatcggtgttcttcaacttataagattgataaataatgaaaagaatactgttaatattaaaatattgttgaacataatatctaaaagcattccattattacttgatgatctctgtaattctacaaaagttgatcttgatttaacttggaaatcattgctaactcataaaatatatgaatctttagggtcaattctagtttatctatttgatcatacgctggaagatatagatagagattatgtcaagtctattatggatgtttatcctacaaatattatgtcaaatcttctacatttacagactaatgatcatgatcaattaaatgcaataagatatattattgtatattttctcaataagagggatgatgatctacttttaatagtgtttgaaaactggaataagtgtattgaactattcacacaacctaaagaattacatgctaaacaaaagtttcaatttactgaacttcaaaataaatttttaattggatttttcaaccaaatgaactcaaatgttagtattgagtcatctatttattatattcaattaatcaaatcacttttgaacagaattaaaccttctagttataaagaatccatacttaaatcatttcaagataatgacaatgtgatagttaattttatttggatgaaaagtattggagctgttaaattgaactatattgaagacctcatgaacaaatttggtaataaggagtatatatccaatacgactaccaacatacaatcaaatatgacaagatttttagtattactactctctactctcaacaatgatcaattaaatcaattatcatgtaataagttatttttagacactattacaaatagacttgaatctaaagtaccaatgtttagagagtttggtatgtatgttgctgatcatatttatactagaataaatggtgaaccaatgtttaaaatttcttcctatgaagccaataaaaaggaatttatgaaattaataaatgagctgaatcaacaatctcaaattgaatctactctatctgacgaagaattaataaacgaaatacaaaacactaaacaaattgaaaaaattgaacaaactatagtggaaaaacaaccaattatgattgaaatgaattacgaatcagataatgatgattctgatcttgatgatccaacagtttctagaaacccaactatagctaaacctgttttcttgaaagatttattacattacctaacaacggatccccaaaatgataaaactacctatgagaaaagatcaatagcatttagtattggtattgaaatgataagaataaagaaaaacacgcctgaattaaagtactatgctactaaattgattgatgcagccatggatcttgatagtgttggattcccaataaaggaaaatgaacaatttaatgatgatgatattaaaatagcatttgattcctggaaattatctttcttaattgctatttgtaccggtgaacctgatatagtgtttgattatttcttaacaaatttcataaagcaagattgggcaattcctttaagagttcaaatattatcttgtattgggttgagttgtagagaattatgtggtagggatgatgacttcatttggggtaagaagagtttaaataaagtgaaacctaaggagctcacaggtttggctcttgaaagttttacaaaattagaacaaatgaatagtagaaaaattgttgatttggatcaattagagaaagaaaacaagttagtgaaagcgttagaaaatactgttatatcagaaggtactgttattcatagatcaagaaaattggatattgataaagctcaatcaatcaaatctacaaatactacattcattaataaaaaacttcctaaagtattcttttcaatgattgcaatttggcaagaagttaatgttcatacttatggtaatggattcgtaattggttcaatgtctgaatatttgaattctcattatcttgatattctatcaatggtatattcatgttcgattccttcgtgtataagtattattgaaatgacaattgaagaaatttctgtacttattggacaattaagaaatattcaaacaacttcttattcagaatttccttcattactttttaaatctatcatcaatagtttaagatcattaatatttgataatgctaaaacgttaaatgttattaaatcatcaaataatttagaattgactgcattattagaatcttatgcacaagtcttatcacagtctccaccattagatgaacctttaaataatcttagtaaggctgttttggaacagttgcaacagtattcttttttgtattcctaatatacatcctatatagctaattaatacaaaaattttggttttccacagtatctacaaaatatacatcaaggctgctaactatttgctacctcttaattcttcaaaatcactggtttttactttttaggtggctcgtcattttaaaaatattgctataactttttttaaaagtggtatttctcttatttttaacttggatattaatttttagcattatcaataccctttatacagctttagtgtgctaaaaaacaagtaaagcataagatatctacaatctttgttgaaatagcttattccatgacacaaaatttgttgtgttttcaacatgataaatgcgagatgtcaaaaatttgattgttgacattttaaaacgctttaacaccaacttgaattctttttgaacaaacaatggcaccttcaatacaaacagaccttattaaccgtcatagacgtatattaagacacagacttaaaaagattaatgaggagaataatacatcttatagattgggacaaaaaaatatagatttattgttttatttaaactacataaaatttgtaaaagaattagcaacaaaggcgaaacaaattgcagagattgaaggctcatccgaaataatgccgcaacattggaaagaatcgggagcagaattattagatacttatgaaagagaaaatgaattaaaatgatgataataatacaaagatttatagagcttatggaaaatatttacaaggtggtttttgatttattgtatttaaacaatacaattattcataaaagaaattattcatatgaggagattttagtatttcaacattttctattgctaactcaggactctccttgaattgaacaaataatccctgtaattgagcagtactgacataaggtaattctaaatctttgaattttttcataaagataggtaatttttccttatcatcataaaatcttaagaacatttgctcaacttgataatctgatgcattattaattaaaactttcatatcgattctaccaggtctcaacaaagcaggatcaagtctctctggatgattggttgtcataaatgttataacttcttcagctgatgcaacaccatctaatgcatttaataatccactgaatgttacacctgatacatatcccttttctgtgctttgtgaacgattgttgaatgctgcatctatatcttctaataataaaattgtatgttcgggtatattgttcatcaaatatgctaatctatcatctgttaaattaggttcaccaacattcataattgcaatattataatcaaattcaccagctaatgcttgaatgaaacttgttttaccactacctggtggtccatataataaataaccacgacgatatggaatacctctatcatgataccatgaaccagattttaaaaattcttttacatcagttaatatatcttcttttatacctttatcaagaataacagaatcaattactctctttgatcttggtttaccaaaaattctccaatcttgaccccatgatttatatagaacagttttaccttcatttaatttcattgccatttgtcttgcttcatctaatatagatgctagtaaatatctatctttgtataacgtctttagtgtaactgtttccattggctgtccagaattatgtattctttctgatctttcacgtgaaacgaaaaaccatgaatttttatatttaaaccaatgattaccaggtcctggaacaaatgaaaatccagtcatcacagatccattttgatgttgaacaaaacttgttttaacactcaattgtcttgaaatacgatttggataatttgacatccaatttaaaaaccaatcatatgacttatcactatttctgatttctaaatcaacaattaatctacgatacattaaatttgcaaatgatccaacacctttccttaaaatagaaaaacctgcacctaataacatcaatccaccaccagctgcaaaatatggatttgatgcaaatacttcttttatattaaatggattcacatctttcttgacgtttgcatctgttggtgaattatgtggatgattatagttcaagagcgataaatcttcagttgatggagtttcaataacaccttccactataactggatcatctgagactttatgaccttcagaactggatttatccccgcttaaccaatctaaaacacccatactttgacctaccaagagcagaaaaaactttgtagaagatcatcctagaaggtcaaggtgaaaaatttgtattatgtaaccaagctgcggattgacgaaggcaactaaacttgatgacgtttttttaactttgcacccatattctccttttgattcgacaccaattcataattcaattggcaagattaacaattgaaaacttatttttggattgaacttgaattaataacgaaaaacaatggaaatgacaccaaaaataccagatttagagatcgatgctgatgatgtgagtgatctcattgatacaaacaagatcaatgataacattagtaaagatttacaagatcaaaatgataaatcaagtcatccttattcatcacttgcaatagcagtggatgcacaagaacagttaaatgcacaaaatgagagtgaaaattcccaattagataagggacacggaaatggtaatgatattaatgatgaaataccaattgagacaaaggagccagaaaaggtttacgatttttcaaaagctatatcagtgaaaacatcagatagaatcttagatgatttgagatcagatcctttatttttactgaataatcaggaaggtattttatcttcaccaaccacccattatgctagtaaattatctaatttggcaaacaattcagttaggtatagtcctgtattttggaaaacatcagttccagtgattgcatttaaagaaagtctagcattggatgaaaatacaacattggtgacattcacaggattacttgtaccaaatacaccaattagtaattttgcaaactccaaagtatatcactattctataagggttagataccaaaacagcagagtcaacgtgaagaatacattttatggtttcttagatgatgatctttatgaagatgataaattttgggttgagaataatgatatactatcagagggtttacatatctctgaaacctctatgaatgtcttattgaagtctctgcctcatgttctggattctgcaaactttttgtcaaaagataccggaactttaataagattagaaatttattcaagcaatttttcaagcatggacttagagaattttgaaactgaagagattcaatcaagaatagcaatgtttaattctcaaacaactgatggaaatgcattcaatatgataaacctgacaccatatgattgtttattaaaattaaaaagtgttttacttggagcattgaaaaatcaagaatcacctaaatctattgatttagattcaaccagactttcagtgtttctagatattaacttattatttgataaattctttttctccttatcagaaagagatggtcataatgcaattaatccagccgatttccaaactttaggagagtatgcatttgtatacagagatttactcagaagatgtgttttagaagttgtttattacattggtttaacatcacctcataaaaatgaaatatccaatttattttcatcatcattcaatgatgtttttgaaagtataggggagtttgattacacagagcaaataaaaaattggaacagttggaatgatcagttttatgcagaagcaatgttagtattatctgtcactccatattataaagatcaattagtccaccatatttatgaaacattagtatccagtgatccagccagtacacctatttactttgacgctttgacgtatatttgtacttcaagatatacacaagatattcaatattatgtaactatattaagaggcaatggtatgttaggatttggtgagttgaaaaacattttcaccaaatttggtttcccagtgaatgattgccactcaatgagcacaataagcgatgaagatatattgaatgcttatcaaaaccaattaattgttgcaagtagtaaatatgagaagaatacatttagagatatgttgaataacatagcaaaatatagaacaagtaacaaattaattgaatatttgaacacagaaccatattttgatgttactgatgcatataacttacttgaaatagatccaaagattgatgattcattactcattacattttatgattataaagtcagtgagaatggtatgaattttgatcccaatgttgcaagagctttttactcaattgtattgagccggaaaagtgtcactttaatgaattatattgatatgaacttaccacaattcagtagttctgaaatttctattgatgatgcatataatataattggatgtttacaaacagctgatgatttaatgattattagaattttccaagaacgtgttgcaaaagatactggaacagattttagatcattatggagagcattgaagactattagagatcatagaaggtctaaattactaaatggttatattactagtggtattgttaattccactttgttatcagttgatcaatcaccagctggattgaataatataggtaatacatgttatttgaattctttactacaatactactttgttattaagccattaagagaatatattttagggtttaatgaagtttttcatgctgaagattttgagaatgacgaaaaataccaaactagaagaattggtggtagaactgtaaacttgaaggaaactgaaagatcataccaattcatgtatcaattgagagatttatattaccacttaattcacaccagtgaaaaagacgtgacaccttcaaaagaactagcatatttagcattcagtcctattagttttgaagtcgaatttgaggatgaaacagaaaagaagattgaagtagcagaaccagttgaacaattaggggatgatattaaagctgaagaagcaggagatactgaagagaaaaatccaaaggaaaaacaagaagaaaataaggaagatgcagaagaaaaagcaggaaattcggagaatgcagtaattaatttgagtgatgatagtacatccgacgatttaagtatcgaaatcacaggtagcaaagatgtagaaaagccaattgttaaaaaatctgcagccggatgtaagattagtgctgatcaatttgaatgtgcatttgaaattggtagtcaacaagatgttactgaatgtatctctaatgtattaattcaaattgaaagtgctatgagaccagatttgttagatgagaataatgaacaaattgacatgattaaaaaattgttctatggtaagactaaacaaagattagtaccagttgatagttcaagtaagaaagaactagtagatggtaatgtcagaactaaagttgaaagtttccttaatttaattgttaatattggtgatcatcctaaggatatttatgatgcattagatactttttttacacaagatttaattgaattggaagatggtgaagttaagagatcattaactattttagaattaccaaaaattttacaaattcaaattcaaagagttcaatttgatagagttagattaattcctgttaaatccaatgaaccaattccattcgaggagaaattatatatggatagatatttagagaccgatgatcaaataattatcaataaaagggaagaagtattcaattggagaagaagagttgcagagttaaatattagaaagaatgaaattttaaaagttaatgatcaaggtttaaatatgctagatgttttacaaacaacccatgactatttaaaatcattagcagttcaagaagaaggtatcaatattgaagagaatactattaatgttatcgaaagagagattactaaattaaaggaagagaaagttagtatattaaaggaaattgaagagttagataataaaatcaacttacaattcagtggatttaacaaagttggatattctatttttgcaatatttatacatagaggtgaagcatcatatggacattattttatttatattagagactttaaatctaatgtttataggaaatataatgatgaaattgttagtgaagttagtattgaagaaattttcaattttagagaaggtaataatgcaacaccatattatttatcatttattaaggatgaattattagaagagattacaccattagagagggatattatgattcaagatatgttagaaggattagttaccgaagttgattgaatgtaattggaatgtaacttagtttattgataataataaagcttgatcaatatcacgtataatatcttgataatcctcacaacctacactaaatcttagcatatttttataatttaaatcatttgaataaataaaatttggattatttgtaattaattcgactaaagtttcaccaccttccataacaggatttgtacttaagaaattaaattttttcaataattgatttggaataatatcatttatgaattccaatgcaaaaacaggattataataattattcaattgagatttgattagtgatttatttaattgtaatgatgaatgatgtatagttttcaaaattttcttatatttattgaaattatcaataagataatttataattaattttgtattatcacattgagtgaaaattctcattttataacttcttaaacttcttaaaagcaagaaactatcaaaattagcaattgaagtatttaatgcatttctttcattaattaaacctaatttatcattttttttcaaagatacaataaaacctgcacttaaatcacttacaccagataaatatttaacagctgaataaactataaattttgcaccatgatcaaatggtgattgtaaaggaggtggtgctaatgttgaatcaacaattaaataagatgtctttatattagaattttcaattaatttagaataatgtgaaatatcttgaacataaccaattggattcattggagattctaatataataacagaatttggtaaaatttcaatgttttctaataatggtataattgatagatttgttaattttttcagtaatttaacaacattataagtacccttcgaacctgaatctgatatataaatagttttaggattaatatatgttaaaatacccataattgcagatgatcctgagttatataatgttacatgaccatttgtgatattctccaagatattttcaattgctaatgtagttgaaacacttgatgttggaggtagtgatgggttatttgatattgtttgttgttgttgaaattgctgttgattttgttgaggtgggtattgttgttgtaaaattggcggagaaatcggttgaattggaggtgaaatttgatcaataccatccatcatccaatcaaatgatttcatccaatcatgagaatgaattaattttgtactgaacccaatatccaaaatttcttcctcattattattattatcatcaagagtttcattattatcaagcttttcatgccgtattcttttataaactggtttcttcttgaaatttttcaaattcggattatcattaaccaatttacgtaattgatattcatttgttaaccaattcgataaagttgattgagatatttttaaattagtataattattgaaatactgtatagtttctctctgagtatgagcaggtggaccatgtaagtagtccaataccgatagtttctcatcaattgtcagtctcatttggttattaaataaagaaagatgatgtagtgaatagtcatgaaaaagattacgtaactcttctttttttccatattagacgaaatttatagcaacacaaccaaccggtgataaattattgttattacatgcatgagatcaaattggattcggtggctgtttcttagagatctcggtttgttattggacaatgagtggcctcagtagaagacgtggtaaggaggatagtaatgttgactctggagacattgatgatggtaacattgagtctagtttaccatatttaacccttttagaggaagttttattaattggattaaaagatagagaaggatatctttcattttggaatgataatatttcatatacattaagaggattaattttaattgaattagcccttagaggtaaaattgcaatggttggagattcagctagaagaagatttgaattaaatgagagattaattactgtaattgatagtaaagcaacaggtgaaacattattagatgaagcattgaaaataatgaagagtgaaactgaaccacatagtgttagttcatggattgatttattaagtggagaaacatggaatttaatgaagatgggatatcaattaaagcaagtacgagaaagattagctaaaggattagtcgacaagggagttttacgtactgaacataaaaatttcctcttatttgatatggcaacacatcctttaaatgataataatgcaaagaaagttgtaattaataagataatgtcaattttaactggtaaaaatattattttaaattatgatgaaaaatattttaaagagaattcacaatggaaatatttaagaagtattatattagtttgtggatgttatgcggcaaatgtacttgaaaatgttacaacaaatatgtcatttaatgatagagatttagcatttgtacgtgttgatgaattattaagagattttagtgatttcccatttgatattaaagaatcaagtacaggattaggtaagaatttaggtacagaaattgatagtgaaattgataataatagtaagaataaggatagaggtggagaatcacaattacaattacaattagaagttattggagcagttattagtattttcagtaatatggattcaattatataaataatatattatatattatatatattatatatatatagtttatttataagtaataatactttctaataaccaacacttattaaataatctgccattttttcgataacatttgcggcattaccagctgatacaccagcaggataatgagcaattataattgctaatttagttttaacacacataacaccttcttgttcatgtttaccataaattgaacgatcatctgccttaatacaaaattgtttaacattttcaacatggaaacctgacatttgaacacttgaagcatttgtaaaaccacctgcaattaattgaaattcttgaggtgaaacattaagtgaaccagtatttgcccaaactgcaccatcagttgaataaattgcagctttatcaaaacaaccagagttgacaatgttatcagtataagcgttccaagacatgattagttatatactatgagatctataccaaaagaaagtacaataaacctatactcatgtaataatctgtatcaacttcattgggatgatttgattccctcaggcgagaaattaggtgattaaattacgtaatacttatactattaatactatttatagagatcagcaccagctcttttgagttgagatagagtattggtattggtactgtcatcaatgtctctgataggttcaatggattgaacgagggtaggattagctctaattggtttaacagttcttttagttctattggataaaacggtagctaatgaacgatgtgccattgatttagttgaaacaggtctaatatcaactgcttttgttacattaataccattagtaataataatatcttgttcatcatctttaataccaataatactttcacattttttatcataaagatctaaaatttcattacctaattttaaacttaatgaaccattatcccattcaattattgatgcattactttgtttataaactttaccatcaatagttttagcatatctccatctaattgtatttgctaattttaaagccttaaaacgttttgttttagtgacactttcatcatcactaccattattttcattttcttcatcatcatcgatactatttggattaaatgggactgcatcaactgataaaaatctcggcacattaaatattaatgctttattactcttacttgagacaggatgtcgagatattgatactttagttgtagtaatttgttcttcctcttgttgttcttcactgtcattatcatcatcatcttcttcaatatcattattatcaatattattatctatattgttattattatcattatcaacgtcaaaacccatatcatcatcatcatcatcatcatcatcatcaccgaataatccaccatcatcatcatcaatgtcatcaacatcatcagcaatatcattattattagtattactattaccatcattattattatcaatgctatctacctcctcaacaacctcactgttatctaccaccggggtagtctcactctccaccatagtctctaccttatcactgtcactcattatcctctaaagaactactatactctctacacaaccacctccaaacttaaagagagactcaaaataaagaaaaaacccaccgacgcaccgacgcgattttttttccacgattttttttaacctctttccttactttatatattgagtatctgagtggggagttagtattggtattaagacactcttttatgcaaggaacaatgcttgcacgtaccgttagaccctctatagtgtttagatccactagattctactcctctaatcacggtcacaactctggtgatcatcattctagtgaacatcattctagtgaacatcatgacgaacatcacgatcatcatgatcatggtccaccattatctgaaagtgaatcaattcttaattccaaaactgctatagctgcaggtattgtattctcaattgcatcatattcttatcttaataatcaatataaagaatctcataatggtgattcaattacttcaattgtttcttcaaaacataattttgatcaattaaaggaaaattataattcttatagaaatagagtttcattacagaaggaaattcaagaaatgatgatgttcccaagtacagaaaagagaaattataataatttaattacttctattgataccgttcctggtagattattcccaactggttcaaattctcaatttaatacaattcaagattattcaaaattagataacagaaaagttaaatcttctccttttatctaaatctattatgatcattacaacttatttatttattctttagctagtatctcttatatacgtctataatattatataacatacttgataactcttattattattcctatattaatctaaatattatactatactactcgctatataatttttactatgacatgaatttttcagtttttaaaacacaatctttatatcaacaaacaatcttatagccacaatgattgcatctaaatcagaactgatatcttggataaactctacttttgacttaaactacactaaagttgatcaatgtggtaatggtgtagtttattgtctaattttcaattctttatacccaaatattatcaatcctgcaaaaataaatacaaatcctaaaactgatttccaaattttaaataattttaaattattacaatttggttttaataaagttaatattaatagaaatattaatgttgataaattaattaaatgtagattacaagataatttggaatttttacaatggttctctcgtttatgggatgaaaagaataattcaagaccaatttcaaaatcaagtaatgtttcatcttcaagaccttcaccaagaacttctcttagaccttctcctagaccttcaataatcactcatcataatcctcatccaatttcaagacaatcttcaactataaaacctcaattatcaaaagaatctcctaaaccatcaccaaaactatcaacaaatataacaccaataaccaaaacaacaacaccaaaacatacaccaattgataaatcaaatgaaatatcaacattattaaataaaattgaaaatttagaaaaatttaaagatggtttagaaattgaaagaaatttttattttgataaattaagagatattgaaatactttgtcaaaatttattacaatcgaaaaattcaattaatttatcaacaaatgatttaattaatgatatattggaaataatgtatgctacagaggatggatttttaccacctgaaagtgatgatattgaacaaaatcaagaaattaatcaggaatatgatcatgatcatgatcatgatactaatcaagatactgaaataacagctacattatcaaattccccaaattcaattacttctccaatacccattaataattcatttaataattcaattaataatgatttcttagatgatgaaactttttaaattgttactataacccagatttataattaacctcttatagctcattaattcctaactaaccataaattgcgattatttttatttatattagaataaatcccatccatcgaattaccaaaaatccttatagaccgttcataattccatgtactgtaattttcaaaatataatatgtattttaaatttttaggtacttttttcagcccttttatttcgatttcaaatcggaaatttgaaaaatcaatgaaatgaagttgacttaaattaaccgcatatgtgaaattaaacttctcaaagttataatattttatattgtttatacttttatgaatcgtgatttctaatattttcaaacttgaaggtatatcaaatatagaaaaaggatatcgaacatctttagtttgggatattttaatcgtttcaatctttttaggtaaacccttacttaaaaatgaatgatcaacattagcagatgaaaaatctatttctttaagatatttcattcttttcaatgatcctagagtaccataaccaataaaatcaaaaccttgaaaattgagtgtctccatatattcaaaatttttaatatagtcatatttataacgacgtttaccacttcttgcattacataaattaaccttctttatttttttaacaaaataatcaccagaagttagcattgttaaacttgtatgtcttccaggattcaaaataactgttaactcaattctaaatacatcaactttaattttatgagttttgagaaagttatcaaacatttcaaactcagatgacattttctcaacacattcttcattattcatctcaagggtataatttaactcaaaataaaatctatacttctcgagtgttattctactttttatcacattgtccaaatattctagagcaggttcaacctccatattaatctttacgttaacattcatcaatttaaaacaatcattgaaacattgcaaagcgtttgagcttacatccatacttgatatactaggatcaagaacatattcagtttttttttcaacagaatcactgctatctttacaaataaagtcacaccttttactatatttgaataaaactccaaattctgtagtatcacctgttataaataatttaatagtaatccatccatcaattaacaattcttcaaactttttaatcattttgtcattatcaaattgaagtgaatctaatgaagtttcctctctattaaaatttaaactatacctaccaacttcttcaatttttaaattaaatagttgaaccctaaaatcatcgttaagtatcattgttaaaatcaattcacttatagtgaagtttttaagacatattttggatattaatctttcagatagatgagtaggtaattttgtaaattgcattggttatttcaagtaaaagaaacaatgttatcataaaattcaaaatattttgctgagcccgcacagttaaaaagaatcagcgataagaaaatatcagatgtttcccaacaaaattattttcttcaaagcagcatgttatattgatacattgttgcagataaaccaggtaatgttccattatactttcgaatacgtaaattaccaataaaatattgattaaaaaaaataatatatatagttgaattaattgaaatagtagcttccccaaaatcatttgtaactcaacttcaaaattatcaaatttgattttattgattttgatgatatcttcaaacaattaaaatttcaatcatcatcatttattttttcaccaccataaaattctttattataaatgaaacctttcactatatccactgaaaaaatctaatgtttgagttcgattcggagacaatagtaaagtttttactgcttgataatttatcaaataatttataagccaaattggtttattgctttggtcattaaaagaaaagcataatatctgaaaagtgttttttatatcattatattttgacgagcagcgttcagtgaataaaacccgttcttcagcccttgataataatgatgatagcattataaattatataaaacgcaaaaataatgttaaggtgcaattatgtaaagtcatacaagcttattgatatatgcaaataaccattaacaacaattaatgcctaactaaccttaaatttttgtcattcgtgatattaatattggaataaattcccttcatatcaatacctaccaaatacatattatatacccttttattaaggttatgatcaacatgtatcaaatatcttaagcttttaggcactgcttttaacccttcaacactaatcatattgccagagaaaccaagatcctgcaatgaatgattgattaaataaatacgacttaaactaattgcatttgtgaaatcaaactcagcaaaattagctttttttctataattttgacgaatttcaatttctaatatttttaaatttgcaggtactttgaatacaatgtgggaaatcggttgatgatatgcttgaagtattctaatgctttcaatacaatcaggtaaacattcactcatccatgaataatcagcatcggcatatgaaaaagtaacccgctttaaatatttcatactttttaagggtcctagaataccacaacgagtataatttaaacttcgaatatcaagtatctccaaatattcaaactctttaataaaatcagattcaaaatagtattgaccacctgtatcattatacaaaataaccttctttatttttttgaaaaaataaacgcttgaaaatagcttctttaagatatcaactttaatagcaccactgaaaataattgttagttcaacttcaaaattattaactttgattttatgggttttgacaaaattttggaatttttcgtacttcattaacatattgtcaacacacttcggatttgctatattaatcttatgtattgacttaaaatcaaattcatattttttaagtggttttcctctttttaccaaagtttctaaatattccaaagccggttcaacctccatactcatctttacattaatagttattgatataggataattaaaagagtattgcaatttagtagagcattgatcaatacctactattttaggattacaaacatattcaacggtttcactatatttaaataaaactccaaattttttagtatcacttgatataaataatttaatagtaatccacccatcaattatcaatttttccaacttttcaatcattgtatcatcatcaaataaaagtgaatctaataaagtttcatttttattaaatgataaagaatcactaccaattacatcaacttgtaaattaaataattgaaccctaaaattatcattatttatcattgttaaaatcaattcactgaaagtgaagtttttacgacatactttggatattaatttttcaaataaatcggtaggtaagtttgtcaattgcattgtttattttaaggaaaaaaagcaatgtgatcataaaatccaaaagattttgctgagcctgcacacttaaaaaaggttagcgataacaatatagagataagaaaatatcaggttttccccacaaaattaattaatagcaacttactcaataattcaattgacaactatttctgagatcaataaaacttttatctatttaaatactcacaaataactattttagccaatcaaatcctaattaaagttaaatcattgtcatagttattaatatttgaataaattccatccatttcaatacccgaaaaagtcagattccgttggtatatcctttcatcaaagttatagtcattatatattaaatattttaaattcttaggtacttccttcaaaccttgaatcttgattacatttggagcagcattggaaaaataatcttcatatatcggaatagttaaatgaatatgacttaaattaactgcattcgtgaaatcaaatctatcaaattgaaattcctttctatctttgatcatttcaatttctaatattttcaaacttgaaggtacattaaatatagagttgaaatattgatgattatcagtttgaaatatctttattctttcaatacaatcaggtaagcattgattcatccataaataatcagcattggcatatttgaaataaatctcctttaaatattccatactttttaatgatcccagaaccttataatcaatatcaattaaacattcaatatcaagtatttctaaatatttgaactttttgatacaatcaaatttaaaataacatcttttgccggaagattcatataaaataatcttctttattttttttgcataatcatctattgaaattatttttttcaaacaatcaaatgaatcatatacggaaccatttaaatgtaaatataaaacaatcttaaaactagtaactgtgatttcatagattttgagaaaatcttgaaactctttgtacttgattaccatatcatcaacagaatttttatcagctaaatcaagcccatgtactacattaagatcaaattgatattggttaaatggccttctcattattatcatatttactaagtattttaaagcatcttcaaccatcatattcatctttactataactttctttgatttaacacaataatctaaacattgcaaatcattcaaacatacattcatacgtaataagtttagatcaacaacatactcaaagatttcagcagaataatagatgcttccattataacagtaacaccttttactatacttaagtaaaaacttaaatcgagaaatgtttgttgatattaatgacttaatactaatccatccatcagttatcaacctctcaaactcatttaccatttgatcattactgaaattaagtatatctagtgaagtttcatcattattaaatgataaagaatctggttcagtagtattagttgcatcaatttctaaattgaataattgaatccgaaaattatcattctttatcattgttaaaaccagttcacttatagtgaagtttttacgacatacctgaggtattaatctttcacataaatcagtggggagttttgcaaattgcatcggttatctcaaggtaaagaagcaaaaagctatcctaaaatccaaaagatttttctgagccctcataattaaaaaagaatcagcagtaacaaaatatcagaattttccccacaaaatttgaagatagaaccaggtaatgtccgaagttcaattataaagagatatgtagtaatcacaattagtttctaactaagcatagatcattgtcatatttatttatattagagtaaattccattcatatcaatacctgcaatccttataggttctctaaactcccttatcagatttctataatcatcatagaatattaaatatcttaaacttttaggtacttccttcaatccttctaatctaataaaaaatttatgcgggttaaaaacataatcatcaaataaaaaattacttaaatgtatatgacttaaactcactgcattagtgaaatcaaacctatcaaattggtacccctttccattatcatcaatttcgatttctaacattttcaaacttgaaggtaccttgaatactgattttgatttttgatactcgtcattttgaaatattttgatcctttcaatatttttaggtgaatattcactcatccatgaataatcaacattagcatatgcgaaattaatttctttcaaatatttcatatcctttaatgatcctacactactatgattcatatcaataacacatttaatatcaagtgtctctaaatattcaaaatctttaatacaatcaaatttgaaattacatttctcatctgaatgactaaataaactaagcttttttatatttttaatatctttatctaaaattttccttggtaaaacattcaatgtattatattcaccaccaattaaaaccattcgtatttcaatctcaaaattgtcaacattaaatttatgggtttcaagataactttcaaacgctctataatcaatttccattttatcaacacaatgatcatcagctagttcaagcgtttgtatcatttcaaaatcaaaaaagaacttttggtatgaatcatacacattcatcataactttatgtaaaaactccacagctttttcaacattcatacctttaacctgtactttaactttctttgatacctcaaaaacatcaaaaaattgtagtacatgtaaacatgtattcacacgtgatgattcagtattaaaaacatattcttttacctctttaccaaggtgaaatttttcatcacaaatacaataatgcctctcactatacttaattaaaaaatcaaatgctgaaggttctttaaagataactaatctgattctaatccatccatcaatcaccaactctttaaatttcttaatcatgttatcatcactaaatttaagtatatctaatgaaattacatcttcatcaaatgataaataatccttatcaattaccttaatttctaaattaaataattcaacccgaaaattatcattatttatcatattaaggactagttcactaatagtaaagtttttatgacatactttggtagatattctatcagacaaatgatcaggtagtttagttaattgcattggttgctgaaagaaaaggagtgaagaattggaatagatctaagaccaacatggtgaatgtttattaatgccaatgagaaaggaaaaccaatttttcaagtattttgacgagccgcgtcaccgccacatcaaccactactaacgttaaggtgatgagataattcaaaggaaatggtatcaaattaaagattaaatgatgttaaacagcaagaataattattcttaaacgagactccatatatatagtactaaaattgttaattaattaaacataatttgtatacacattcacctagagaacagttaaagataaatatttattttttaagccaatattagaataaacaccacttacatccacaccagtaatcttcaattgctctaaaggataaaattgtttcttcatattcttaccttcaactaacaaatatttgacagattccggaagtttctccattccttcaattatgagttcatctttcttagaagtcgtaggatgtctacacaaaggaagtaaaaatatcttttctaaaccgcttgcattatcaaagattatcctgtcaaaattgaatttatttttatcactgacatgaagttcaaatactttcaaatttgggggaactttatattttgaaataacaggaaaacttgtttcaatcaaagtcgccgtttcaacacttgatggtaaataattagtcatccactcataatcaagtttagcagatgtaaaagaaattttcttcaaatttttcatttctcttaaatcacctaaagttttataactaacataaatcaatgaattaagcattagttcttccaaatacttgaactttttaatggcggttatatcaacttcagaaggatttggaaaatcatctaaaatgattaaatgttgaataagtttaatatttaaaattgaacctgcataatcaagaaaagaatttagcttacgtgcacttgtcatccctagattaaattgtaaaactatatttgaaacatttaaatttgctttaggacgattctctttatatttcatgattatatcataattttttttgaaactatcaaaactctttatactgtcgtgatcggtatcaactgcaaaacccaaaaagaggtttagtttaaagttaacaaattttagataaatttctttaaattcgtcgaaaattcttggaagagtaataccatcatcatcaacttcaaaatttatagttaaattaactgtaattttctttgatttattaagttttctggagaaagcacaaatttggtttggaagtaattcatctaattcaaaaatatactcagtgatttcatttagattatttgtatcaaatctattaaactgaatattttcttcactgtatttaaataaaaatgtgaactctgaatcacaacatattttaacagacttaattgtaacccaaccatcacttagtaatttctcaaatttagcatacattggtttatcaaacgtaagattatcgaaagatgtatagtcatcagtatcaaattgaatacgatttttatcagagatgataatttctaaatcttcaactacaattctaaattcatcagagtttatcatgttgaaaatgatctcactagttgtaaaattctccttacatactttggtcaaaagtctaggatctgctgctgtgattgagtccattgttgcactatattgatgattatcagtgaatgagccgttttaacgaacaactgtggaaatttggtcgtcaattgaatattgagcgggttagttaatttttttcactggtttcagcattatcgatacattttgtatgccttagttgtttctaataaatatttcccttgaattgataacataaaccagttaatccaatatttagtttaattttaagtactattgatatatattaaaagaggaaactttaaatgaagattgttagagaaaagcctaatcctgtctttctatattgattttcagctgagcctccatattatacgctgaaatgattaagttgttaattaacagagctatacatgtatataactaaagaacatttaggcacaaatacttattgtccaagccaacattagaataaataccacttacatcaacacctgttatctttaatttttctaatggtagaaactgttgctccaaatttttaccttcaactaacacatatttgacggaatctggtagtgtctccattccttcaataattatttcacccgccttagagccactaagttttttgtaaaatggaagtaaaatgattctttctaaaccattggcattctcaaaatctattttatcaaaatcaaatctatttgtaccattagcatgaagttcaatttttttaaaatttggtggaatttttaattttgaaacactaggaaactttggttgaatccaagttaaggtttccaaactagatggtaaatattcactcatccatccataatcaagtttagtagatgtaaacaccaatgatttcaattttttcagatctctcaaatcacctaaagtcttataattaacatggatacgagagttaaacaatgctgtttccaaatgcttaaattttttaatagaggttaaatcaacttcaaaagcattccgcatttcatctaaaataatcatattcttaatgagtttagtgttcaaaactgaacttgtgtaatcaagataagaacttaccttacttgagcttgacattcctatattaaatcttaagagtatattccttatttctatatttgctttaggatgattctctttatatttcataattatatcataattttttttgaaaccatcaatacttttaaaactgcagtactcaacatcaattgaaaatcctaaaaagaaattgaatttaaaattagtggatttttgataaatttctttaaactggtctataacatttggcacaccactagcatcctcaacagggtgcatatccaatgttaactcgagtgtaattttctttgatttatcaatttttttagtaaacgcaagaacttgatttggaaggaactcattcaaaattatcttgtattcagttattttatccagattgcttaaatctaatccattacattgtatattttccttactgtattttaataaaaatgtgaattccgatttacattttattttaactgatttaattgtaacccaaccttcccctaataatctttcaaatttagcatacattggtttatcaaatgtaatattatcgaatgacgttgcaagatcggtgtcaaattgaatacgatttttaccagagatgataatttccaagttttcaagttttactctgaaattatcagagtgtatcatattgaaaatgatttcactgatcgaaaaactctccctacatactttactcaaaagtacaggatcttttgttgtaattgaattcattgttatactttctggtcaattatcagtgaatgagccgtctttttacctaccaagaaaaagtcagatcaatcgcatcaaattttttcatgttggaaaattatcaccggtttaatataagggtttatcattggcacatttatatgcctaaaatatctacaatcaattaaacaaatacaataatatatatatatatatatatatatgtatatatctagagctttgtttccaattacttttcaaccacacataaatgctcatctttcaccccaatgttagtatatactccactgagatcaattcctttaattctcaccttgtctaaaggacacaacaaattagtaggattgttactatcaacgacaacatatctcaccgattctggtagttttttcattcctgtaatagtaatttcatgtattttggtaaaactattaacttcagaatgaggagataaacagattttagttaagttatctgcattcctaaaatcgaatctttcaaactcaaacaatgcttctccttcattttgatatttaatacatttaatgtttggtggaacataaaatacgctatagtcaccataaagccaatcatcaaattgggtgaatttaattgtttccatacttggtggtaaatatttactcaaccattcaaaatgaaccttaggatgtaaaaaatgcatttcctttaaacttgtcatatctctcaaatcaccaagattctcaaaatcaatattaatataagaactaaaaaaatgcttttaacgtaggctaacttctttatagaagttaaatcaatttcacccttattacatactcctgtaaacattaaagaggtaataagtttgatatcaaacgttgagcatatatgatcaataatagcgttcatattataaggatgtttttttcctaaaaaaaatttgagataaacttcaccaatttcacagctcatacctggatgtgtattagcatatttcttaaataaatcaatatttgtatttaatctatcaatacaacttgtaaagtctgtattaataccaaacacaatatcaattacaaagtgaaagcttctaaattttgtaaaaacatccttgaactcttcaaagaacttcaaaatattaagaacatcagaatctctattttgtggtaatattattttgatagtgactttacaatgtttattattaacttgcctaagaaattctgcaagcataaatgataaaaaatactcagaatcaaaatagtattcagttatcatatcagaatagcacaaattcaacacattggattgaatattgtaatcacaccacattaaaaatcttgatgacaattttgatacagcacaaactttgtatgttttaagggtgatccacccatcacgtattaatatttcaagtttctgatgcattgactcatctactttaaaattatcaaatgataccccatcataactatcaaattgaagacgatcaacatctgaaacaatcacatctaaatcttccaacttgactctgaaagtatctgactttatcatggttaatataatttcactgattgtaaaattctccctacatactttacttaatagcgcaggatcccttgttttgattgactccatctcaatgtctttatttgtcaaagataattagacaccctactgaattccagacacgtaaaatgaaaattttgaatttgaaaatcaatcgtgattttttttcaccagggctaaattcactgccttgactactgtttccattgtacgattctgataattagtatactaaatgtaaagtatttcgttaacctgtacatgccatatattacacacatctctacgatatattcatatttattatcaaggtataaggtagataaaatatttcaaaaactgagacatattattcttaacagttaaaagtagctggttgagcctccacctgtatagcagctattatttttactaaacaacttctctatctctttctctatctatgctcaactgcatctaaaaacttatccattgtaccaatatttgtgtacattccactaatactaactccaaaaatttgtagttctttaggtggtcttataaagtttttttctgattcatcttccactgtcaaaactctaacacattcagggaattttcgaactccaccgatatcaatataatccatactaccaccataagagaattctgcatcattaacgtataaatgtatattagttaaatcttttgctttttcaaaattgaatctcttaaagtcaaaaaaatttgaattggaaactccaagtcttaatatttttaaatttggaggaatagtaaattttgtattattagagggttcatcaaattgagtaatattaattttctcaacagttggaggtaaataatcattcaaccatgtataatcaatacctggactcataagttgtaatatttttaaatgtttcatatctctccaatctcctaaatttttataattaatttttaaattggtaccaacaataaaatcttcaatatatttaatttttctaacagcattgaaatcaacatcaacacgaccagctaaacttcctattgctaaatgttttatatgtttaatatcaaaaattgaacataattgatcaacttggtaattaattcttgatggaccaagatatcctaaatgtaaacctaagattaaatcagagtcatcaaatgatacatcaggattatcatttttatatttaatcctagcatcataaatttttttcaacaacaaaacgtcaaattcgttatcagtaaatattgtaaatgtccatttcaattcaaaattgaaactatcgaatttcttaaagaatggtttaaattcattaaaatagtttataatttcactaggtttagattcgaaatataggtattcaactgtcctgatattaactttacttgatttattagcttttttaagaaaatctttaatctcagaaggtttgaaagcatttgcatcaaaatcaaagatatttactttatcagtatttttcaattgtaaattattacattgaatatttttgagacaataatcgtataagaatgtaaactttgtacctccataaactttaacttgtttaatagtaatccaacattcacttaataatttttcaaagttttcgtacattggatcaaaaaatttaagaacatcataacgagtgtaatgatcgtctctaaacaaaagttttttatcacttaaaactgtaatttctaaatcttccaatttgactctaaaagtatctgaattaagcattgttaatatgatttcactaatcgtaaaattctccctacatactttactcaatagcacaggatcctttgttgtgattgactccatctgattttccttattccttgaagataactaccatgtattgaaatccagacacgtacagattgaaaactttgatgtcgagtttcaaaattgtgattttttttcaccagtgtagattcactgccttgactaccgtttttgctgcatgattctgataattagtgaatttatcataaagtagtttgattatcagtatatatcatatattagaacatgtttagcatgtagctagatttagtagtacaaaaaaatatacatcaaaagctaaaatgttgttgatatcaattatacatgcactacgaaagtgtttttcactgataaatggttgagcccccttcattaattaaatgcattttctctatgttagattccatatatgtcaattttcaactgcatgtaagtatttattagttttaccaaaatttgtgtatattccacttaagtcaactcctgaaacttccaatcccttctgtggtttcataaggttcaatccagttccatcctcaactgtcaaaactttaacacaatcagggaattttctaactccttgaatcttgatactatttatcttgccaattttattaccaccaagcccaaattctgattcaacatagagaaatatattagttagatctcttgcattttcaaacttgaatctgctgaaatcaaaaatagtcttgtcttgaacttcaagtttcattaatttcaaatttggaggaataataaattttgaattattagaagttgtttcatcatgttgagtgatattaattatttcaacagttgaaggtatataatcactcaaccatttataatcaacccctggagatagaaaatttaatgattttaaatatttcatatttctccaatcacctaaagtacgataattaagttctaaaggtgcccctagaacaaaaatttctaaatatttgaatttcttcaaacaactgtaatcaatatcgaaaacaaaagccatacttgctaaaatcacatgtgttataagcttaatatctaaaagtgagcataacctatcaatttgataatcaagtttacatgggaaacagcatcctatttgaatatttaacattatttcaaaatcatcaaatgatatactaggatttttatctttatatctcatcaaagcatcatattgagattttaattttgcaacatcattatcattatcagtcataatggtaaatgcccattttatttcaaaattgaaaccattgaattttgtaaagaaaactttaaattcatcaaaataattcaacatatgattagttgaagattgtgcatcagagaatgtcatcattctaatattaattctacttgatttgttgacttttttcaggaattttttaatttcagaaggtttttcaagatcagaatcaaattcaatttcatttattttatcagtatttctagtttctaaattatcacattgaatgtttttaacacaataatcaaataaaaatgaaaaatttgaatcactattaattctaatatgtttaatagtaatccaacattcacttaacaacttttcaaatttttcatacattgagccatagaaattaagaatatcataaggagtgtaagtatcatttctaaataaaagagaattatcacttataattctaatttctagattttcaagtttaactctaaatgtatctgaatgaatcatattaaaaattatttcactaactgtaaaattttctttacatactctggccagtgtttcaggatcttgtgattcaatcaactccatatcaatgtagttattccttgtagaaaaaacaaattcatgagtggacccaaacatgtaaattgatttgatgtcggactatcaactttgatttttttcaccactttgaaatacactgccttgactaacgttttttatgcatgattttaataaataacgtgtaaatatatcaactatgtaaagtgatttaactacctgtatacatcatatatagcaacggtttccacatatacctaaaatatagaaaataaagcaaagatattgatattatcaattattatgaaaatatcaactggttgagccccctcaatgagacatgttctctattaggctccatattttatttttcaatagcatgtaaaaatttgttctttacaccaacatttgtatatattccactcatatcaactccaacaaatttcagttgtccaagtggctttagaatctttccttcagattcatcttcaactgtcaaaactctgatacatccaggtaattttttaattccatgaatacttatatttttcttgctaccaacatacgaaagttctgcgtcaacgtatagatatatgttcgttaaatctcttgcattttcaaaattaaatctactaaaatcaaaactagttttgtcatgaacttcaagtttcaatactttcaaagttggaggaataataaattttgtataattagaggttgattcattaagttgaataatactaattttttcaatagtaggcggtaaataatcactcaaccatctataatcaatatcagaagaaagaaaatttactgttttcaagtatttcatatctttccaatcacccaaggtacgataatttatatttaatttggcatcaataacaaagatttctaaatatttaagtttttttacactactgaaatcaacattatgaataatagcccttcttgatagtacaaaatgttttataagtttgatatcaaaaactgaacataatttatcaatctgataatcaagtctgcatgggaaacgacttcctaattgaacatttaagattaattcaaaattatcaaatgatacactcggattcttatctttatatctcatcaatgcatcatatattgattttaattttaatacatcaccatcattatcagtcaatattgaaaaagcccaattcagctcaaaattgaaaccatcgaattttttaaaaaaagctttatattcatcaaaataatttaaaaaataagtactcgtagatttcccatcggagaatgccatcactctaatattaattctacttgagttattaacttttgttaaaaattttttaattacagaaggtttgtggacttcagaattaaatttaaattcattaatcttattagtattttttagttgtaaatcatcagattggatatttctgggactataatcgtataggaatgaaaagttagaattgaatttttgctctggatctacatcaattttaacttctttaacagtaatccaacattcacttaataatttttcaaatttttcatacattgaaccagagaaattaagaatatcataaggagtgtaagtatcatccctaaataaaagtgctctatcacttacaactctaatttctaaatcttcaaatttaactctaaatgtgtctgaatgaatcatattaaagattatttcacttattgtgaaattttctttacatgcttttgccaatgtttctggatcttttagtttaatcaattccatacgtatatatactattttactcctcagaagagttctttgccaaagtattatagtgaaggctcagacattcatctcatctcatctgcctcaagtggaaagttccagtgacgcgaaatggcttaagacagttaaggcagacttggaaggtttgtgtaaaccttccgttatgagttacttatattaggatcgatacggatatcactgatatattctactataagtaaccaagaagtaacatcaattaatgaaataatgatttgtaaaatttcctgataagtaaaaattgtttattataagtaatttagcaatacaattgggtatcctttatttcaacttccaatcattcaactatttactcatccataatacacattactaaccatcatcaacaaaagaaagaaagaagtagcagataacaagcaaaatgtaccctatagagcataaagactgattatctgctaaagacgcgactttctcttattctagaatgaaaatttatgttattaatcctctgttactattatcagtggcaaattgaatgtagtatagtaggatatttatcttctttttagttaccaatatcaaccatgttctctcgattactatctagaggaacggtgtctttaagacctatagtgttgaatcagtcaataacaagatttaacactttaaataatgttcagaaacaattattaataaataataaatcctctattagattattctcaaatagtaatgttaaattatttcaatttacaaattcattaaaagaaaaggaagatagggaaaattcaaaaaaaccaaataaagataaaaaggaaggaggtgataagaaaaaatctgataataataatgaccaagaaaatggtaatgatttctttaataataaatcaccattcaaagattggcttgtttattctttaggttttacatttttattctcatttttaagtgcattaggatcaactgaagtttcaagtaataatttaactttccaagaatttttaactaattatcttgaaaaaggtttagtttataaaattgaagttataaataattcatttgttaaggcagaattgattcattcacaaaatccaagatttgtcacttttacaattggttcattatctttctttgaatctgaagttgataatgttcaagaaaaattaggtattcctttaagtgaacgtatacctgttacctatgaaaagagaacaagtattttatcatattttataccatttttaccaactttaattttaattggtggtacattttacattttaaatactattaagaagaaaagaggtggtgcaggtggtagtggaggtccatttgatcaaattatgaatgttggtaagtcaaaggctaaattattcaatcaagaaactgatattaaagtacaattcaaagatgttgcaggttgtgatgaagcaaaggaagaaattatggaatttgttagctttttaaagaatcctcaaaaatatgagagattaggtgctaaaatcccaagaggtgcaattttatcaggtcctccaggtactggtaaaactttattagctaaagcaactgcaggtgaagcaggtgttccatttttatcagtttcaggttctgaattcgttgaaatgtttgtcggtgttggtgcttcaagagtacgtgatttatttaaaactgctagaaaaatggcaccatgtattattttcgttgatgaaatcgatgcaattggaggttcaagagagaaaaattcaatgagatcaaatgatgaaaaagaggcaacattaaatcaattattagttgaaatggatggttttgaatcatctgatcatattgttgttttagcaggtactaatcgtgcagatatgttagataaagcattaatgagaccaggtagatttgatagacatattaatttagataaacctgatttagaaggtagaaaggcaatttataaagttcatttaggaccaattaaattagagaataaaattactgatgaatttgcaggtaaattagctgctttaacaccaggatttagtggtgcagatattgcaaattgttgtaatgaagctgcattaattgcagctagaaatgatgcagaatttgttacaattaaacatttcgaagctgcaattgaaagagttattgttggtttagaacaaaaatcaagagttttatcaccagaggaaaagaaaacagttgcatatcatgaagcaggacatgcaatttgtggatggtatttaaaatttgctgatccattattaaaagtttcaattataccaagaggtcaagcagctttaggttatgcacaatatttaccagatgatcaatatttaacaagtgaagaacaatttaatcatcgtatgattatggcattaggtggtagagtttcagaggaattaaattttgatgatattacaacaggtgcagcagatgatttacaaaaagttactagaatggcaaatgcaatggttttaaaattaggtatgtctaaaaaacttggtacaattgtatttgaaccaaaggatactaatatgcaagttcataaaccatatagtgaggaaacatgggaattaattgattctgaagttcaccgtataattaatgatgcacatgaaaaatgtagagaattattgagtgaaaagattgatgaagttaagaaagttgcagaggaattactattaaaggaagttattacaagagaagatatgattcgtctactgggtcctcgtccatttgaggaaaagaatgaagccttcaagaaatatcttgatcctgaggatagtaaatagatttaagttaatactgtcatcacttattattgttatcttaagtatttaattcatgtaaatagaagttattataatttaaactaatttaacggacgaaattaatgttttatcacagaggttgagaaattttaaattttctcactttaattagtacagttaattaatattgattaattgatttgttctgtgtactttatctttgatttgttttcttatagtaagtatcgttgttggatagagaagagtgagtgaccgtataatgtttgtatatcaaggaaatcgaatacccttacctaaggatccaatctctgcaccattacagagacaaattgaagaaactcatataattagttgtcaaaatgagcatccatgtttaatttgtgagaaatgtttaataaaatatattgtaagagatgaagtaattaagaatggtaaagaagttgaaattgttttacctgaatctaatatggaaattgttaataatttcaatacatttttagataattttaatttaagtgatgaaattatattttgtagtgaaaattcagttaattcattattagagacaagtttggattatgttttgaaaggatcatcaaatataggtaagaaagaggtagagaaaactacagagacacaaaaggaaaaagatgaagttataaagaaacctgttgaagaaaaagccacaaatcaaacaaatcaaacaaatcaaacaaatcaagcaaataaaagtgatacccctattgataaagcaatatctaataaagaaagagaagaaaatccacctgatataccagaaacttctgaaccagtaaatcaaaaggaaatgaaaactccaacaaaatccaacaaaggtaaacaaaacgttaaatcacctattaatactacaaataaagtaacaaaaccagcagctaaacctaccaaagcaaaggaaattgaaaacattgcttgttatggtaaaataggaacagttagttggggttgtcgaaggacatttaaggcaatgaaagatttgaagaaacattgggaagatccaaatggatctgcatgtttaagagagtttatcactctgcgtcattctacgaagaatgcttagtccaaatctgtgtttaatagataaagttatgctatgtatattgtattctctgagagtcgaactctaaagtgtaatgatataatataatagcaagaggtgtgtaagaaccgcccagtgaagccccagtgagagccgtggggagataaacgttttactccgcctactccgcccagtggaaaaaatttgtgattttttttgccgattttcgttttgtttacttttcagaagttaattgttattattatcattatgaataaaattcactcttctttatccaacaacaactactacagatcactccaattcttgctatccaatgcacccggtcactcacttcaagaatttggaagttgataaggaaaatataaaacccataccccagggaagatcagctgcaaagttgaatgaactgatacatactgatcaaaacacattagagaaaaaattgaatgaagaacaattacaatttgaagaaagtttaactcctgaaatcttgcaggaactagatgatccgttagaatcttatttaacttatttaaaatggattagagaaaattatagaacgggtaataacgattcactttatattcaagtattagagagaacaacgcatgattttaaagatgataactattataagaatgaagtaagatattttaatgtttggttggattatatatcttttagtgaccatccaggtgatgtgttttcatatttatttaaaaaaaatataggttctgagttatccctcttctttgaaaactattcactctattttgaattaaatgatcaatgggatatggcagaatccatttataaagatggtattactaaaagggctagaccttttaaaagactacttaaatcatataatgaatttcagtctaggaaagcgaagaaggcagcacatttgaatgattcagttagtataagtgagtctaaaggtttacttaaccctgatggattagggctgtcatcatcatcatctgttattccagattcaactgagaaatcaaatattttacctaaaaagccaaataaaatgcaaatcttcaatgataatgccaatgaaaataatgattccacacatgagaatgaaagcatcaaaaaacaaaatatcagtttatttgctaatctagacacaattaaaaattcaaagaaagaaaatgtcataaatccatcgtcttgggagggtcaaaaattaaaatcagctacagcaaaaccaccaacagataaaaagtctaaaattgaaattttcaatgataagaaaaacgaatacccagttacaactccagttgttctatcaaatggaacagtcaaagaagtttatgattttaatttagaattattcattccctcgaattcaacaggtgtagcaagaagttggttagatgttctattaatgttcaataaaccgattgaaaacaaccaattcacagataataccgtaacaacaacaaatacaaacaaacgtctgccatcttctttattcaacactcctgttactaaaaaagctaaaacagactctattgaagattctaatgaaaataatcaaaacgatgcaccatcaccttgtgataaatctccaggaattgatgaaactccaatattagattactttaagaactcaaaagatggtctgttttcgggaatgaatgattttgttggctctaaggaaaaaacgcctgataaaagaaatctccaaaatcaattagaaaacgaacaagtttttaagaatgacgctgaatctatcggtgataatgagaaaaatctgttagatgcaattattggtgataagtttaatgatattttcacagacacaattaccagaactaaatcattaaatcttaaacttgatacgaataatgaaaataataccaaacaaaacgaaaacactgaaaatgctacagatgcattactgagctcaccatttgttgataatccaattctgaaagaagaagttaaagacgaactgaatgtaataaatccatttgatcatgtaaataaaatgaaaataatcagcacaatagaacatggtttatttaaagatttaaggtttcatgattttgctaatattgaaaattccaaattaagtgttttgaaaagtattttcaaacctaattcaaaccctatttatggaaataggcaagcaatgatagaatttgaaaaagataatatctattgtgttactaaagaattaggacaaggcgagtttagtacagtttatcttagtgaaaagatgaatggtcagttgaatgctatcaaaattgaatccccttctaatatttgggaagcttatattttgtctaaaattaataaagtttctaatgatttcattaaattacaaggattttatagatacagtgaagaatcatttttaatcttaccatatttcagacaaggaactattttagatctggtaaattgttcttcggatgaacaatttttaacaggtaaaaattttattgacgaaacaattataatttacttaactattcaattgattactaatattatcaaactacattcattgaacattattcattgtaatgtgaaaccagaaaattgcatgttgaatatacaatcttcatgtaataataacaaagtttcattcaaagatatcatattaatagattttaacaaatcaattgatatttcattatacaattttcaaactcaatttcaatgtaagaaggaaaaaacaaacccagaagattgttatgaaattgtcaataatttgccctggaaatatgaacctgattatcatggtattgctaatgtaattcacctgttactgtttaacagtcccctaaaaacaaaaaaacttgaaaatggaaagattgaattagttgaaccaattaaaagatattggcaaactgaatcatggaatgaattatttagcatcttattgaatcctaaaaagtatagtacaacaggattggtaagtaatgaattgaagcaaattaagggtaagtttgaatcatggtttagtttaaccgttgataaacgtctgtttttaagtaaattaaggtatatcagtgaagttttagataccagaatcagaaaaaagagtaaataaatcattaaataacattgcttttgcagtttttgtaacaaattaagagtttttgtaatatttttttaaaccatttatataagtgctatataccaaaagaacaagaaaataaattaaaaaagttagataagaaaaagtaaattaaaaaagaatatgttattaaagtgaatggtatatgtggatattggcaacttacatgttatgaataatttagacagatggcataagacctgttttttcccagcttctgatctccttgtcaaagcataaatatttgaacttctttgctcttaaaatgttaagctcattgttatcgttggaaatataagattccatttcttcctcatgtaaactagcattaacactagtagcatcagtttgattagataaaacttttctgaaacctaatcttgatgaaaaagaagatgaaacaatttcatttgaattttttttaggagatgatgaaccttcttcagaggaatctgaaataacagactcctccaaagttgaagcagaagcaactgattttctttggaaaatacgtttcaagtttgcagataaacgtcttctaaatgaactacgtggtggcctggtacttggtgttggttcagacaaaggttctagtgattcatcttcttttggaactattgaaggggtttcttgctctttatttgcttcttctaatctggtatcgattgaaacaaaatgttcagcacaaggaagttctccaattgcactaattatatctggatcaatatactcttctctaggctggtgcttatcatcaaaaggattggaatcaatgtttggactttctaatttaccagtgaatggattaaaaagttgtaaatcatcacgtaactcatcaatatctgttgcatgaagagattcgttctcagattcactgatatcattatcatcttcttctgtttcaacactatatctttcaggatttcttagaattgcatgtttgaaggtaagatttgaagttgctgtaaatgataaaacgtcataattttttggagagtgtgatgtatgagcttcaccggatgatgcaacagttgcatttcttgatctagtatcttcatcaatttcgtcacttctttgatcactcgaaacgccatcggatgaagaatactcagttgaatagtcatcacttgaggactcttcgtaataatttctgtaccaagatgttaaaaaaggaaaaaccatatttacgacacagttatttaaaagagtaaatcaaaaagggtaaatcaaaaagattcaagataaaataaatatgaaaaataataaacattataaactttgaaagaaagacctctatttaaacaaatttacaaaacatagtacagaacttgattcaaatatcttgcaaatcagtattgcactaaaatataatattctgtttctccatctccggtatcaatttgctacccatttcaaagtctgctctgcgattttcatgtgttctgtaataagcacacaatttttttattttcccaaaattccgcggatttttctcttgatcttttcaaatggtctctcactattatacttctcagcttcctcctcagtaacagttttctttaccagtaaattaaagatagaaccaaatgtgacagacataattgtcaaggtaagaataatgacgttgtaaggcattgagaaatcaggagttggaagaaccaaaagacttgtagtagtacgcatgatatattccactttaccattatcatcaatcaatgcaaatatagttggttgaagttcaaatccatgatttgcatcaggtggatattctgcatataataacatcgccttatcaaaattggtagtaaattttaattttgtatgtgctggaacttcaactgaaagttcaaaatgagttggtgcaactctatcaattgctggattgtagacgatttctttgacataatcagacaattcagcgtcattaacattaatgttctttattgtatttccattttcatctgtaacaactacagttaatgtatgcatgtataatcttacaaaccaaggtaaagtttcaaaaatgacgattttttgtggttcatctcctgggttgtataaatcatatctaaaacctccattgtcttgtgaataaccggataatgatcttgaagcgtaaaatggcggtgcttcaactgaattaatcaatgatgcatcctttgtattaaaagcaatattatattgcgcagttgatgtaagataaaaacacagctttgaatcttcataaaaatcagaaactggtgccaaagttctcatttcaacagaccaattatccaaatcaatatcaagacatacttttgttggttcagatcctaatagagaaccaccttcaatttgtttaccaaataaatcaataaagctgaaatctaattcttttgacggaggtaatgggaaacaattgaaagcatcaaagagccttgtttcatcacatcttaatttggcacctggtgtgggttttggaataggcatttcatttctgtctagaatctttggaatgtttaatatcatgttaatggattgtttcatgctttgttgacaatggtttgcatcaccttcactacaatctgtcacaacatcaatggccattgaagaccattctgcattgaaaattttgttaccggaaagtaaagttgaaataccttgtcttgccttggttggtaataattttaaaaatggagtcaaattttcggtacaaataggttctcttggtaatgcacttctacatctgtaaatgtttccttctaatgcaacttgttcttctaattctacgtcatttgcaaaaagtttttctggagtggtggtgatcgatttatcaataaaattaaatgatgaacaaaacataccggataatgagtttgctaataaaacccagttttcaaatgcttcttcttttgaatttgcttctatacttgcccataattcaacaccagttccacctgtagtaaaaccattatcaaccaattttccatttaattcagaatcataccaaccatgtgcaaatcttacatgaagttctctagcatttgatgattttaagatggaaccaacagatttagggaacacatcataatacagaatatcatttgcttctggatataactttacagttgaattaacatcaaagttaaaggaaaacaacacattatttcctttcaagggttttatgttaaggtattcagagtttgggtagtgtttttcattctcattgaaaaatcgtacctctcttgcttcagtgacatcgggttgtgcttgataatcattatcatcaccactagcacccgcattagcatctgtattgacctctatcagaatggattcttcgtgacattcatctttgtcagcaatttcaatatttacatcttcgacattcaattgattttcagaatcaatatctgtcggtatcttatcattttcattcaaattaagagaagacttttcagcactgactatagcagccaatacaagccctaggatacccaatttcatctgattgtgtattgggtcagtaaaagttaattgtaatttgcagtaaacaaaaaacacgtaaacccttaaaaatgtgagcgctcaataaaagtacaattccttccttgagtgagcgtcttttctttagttgttagataatgtacatagattttgtgttaggaaagttcataaagtaagaaaagtagttatataaaactgtgcttagaaatatcaactcaattattcagatagttttaagttttttgatgttaagtttcatcagttttattctcaaaaagcaccaactaatacatctttgaataaccgaaattaccgcaaacaaaacaaaatatagagtaacattgacttttaaatcatattcttctaaaacttgttgaccattagtaaaagggcattcaccattaggtaaaaattcatcaggattacatttgaattgtaatgatggagtgaaaaccttatttgaaattaaaaacacacaataatgtaagggtgagagataattgataccttttaaaaagttatcaagagtcatagctaaaagacctgccatagccacaccaatcgaacagaaaacagaaataacattcaatgcaaaaccgggatgatcaaatacagtattaaatgaaatacctaatgattcacctgtattaacaacaagaaacgtaccgtaaaacatagtgaaaaataaacctgcattgatttggaaaccaacaacaaaaaccataaatattgtgaatacaaaacatgatataacttcaaatggaatttcaattaataaataactgaagaaaaaagaattcaatccgataacatcatcattgtattcgtagtagaaataatctctttcttgtggataagatgaaatattgttcaacataccggtaaaatataatgcagtaaattgttgaagtaaacccaacctatcttgtataccggacatattacttttcaatctagcaaagaataaagataaaataatagccataccagtaacttgagttgaacgtgcaattaaaatatttttatctctgactaaaccaatccattgtcttattgtaagagtagtgaacccaatgtaaaatgctgccctctctttgatgatagacttaaatatatctctaacttctgatttgttttgtagtgttataacattatttggaatagaaactctatcaatcgatctccacgactgtataataccatcaactctttcccttgtttccaactcaatctcttcatttgatgtgttatatgaaattaaatcaataacaaaatcagcaacattagttaatttaggaataggatagtttagacttgtaaaatgttttatcatttcattttcagttccattaaatgcaacatgtccacctttggctaataataaaattgttccaaaatcatctaatgatctaggttgatgaattgtcataataacagtggtacccattttagttaaattacttaaacattctataatagaagcagcagtgaaagaatctaaccccgatgttggttcatctaagaataaaatttttggagatgaaattaattgaatagcaattgaaagtctacgtttttccccacctgaaatacctttaattaaatcattaccaaccatagtatttgcacaatctctcaatcccatcttcaaaataatatcatcaacaatatagttttgttcctcactacttaaattagactttgttaatctcaattttgcggcaaatgtcagagtttctcttactgtaatagatgataagagatgatcatcttcttggacaacgtatgaacaaataggcctaacacgggtatattcagtgatatgataattattcatgtaaatatcacctgatgaagtgtatttggtaaggaaattagacgacaatctaccactaattaaattcaaaagtgaagtcttacctgaaccagaaggacccattatcacatttaatttgcatttttcaaaaacagcatccacatcgtttaaaatctttttgtttgactttttaagtttattttcaacacttaaatcaatgtttttaattgacatggtgatttttgacctattttcgatatcctttaattcagaattactgaaaactcgattttcatcctctggtttttctttattataaatctcatcaactttttgtgaataatcaatggaattatcaatagtagagctagatgaaacctccttacccatagtaatatctaaaggttttatataaaacacaacacccgcagccgcataatgaccaatagcaaatgctaaaacgacacaaataggtaatgcattccagttttcaggaaaacccaaattgttcaaaatataattacctgagaattgataacataactcatcaacatttgggttagcagcaaatttttgataacatcctctatcattatttgaaaattgattacttgcataataaccaaacgaataccataaatatgcaatatatttacaccaacgaacataaacaggtagctgtttggcattagcaaacaaaccatttgtcattgattgaaatgtaaaatttaagttactaactaatgtagcaattgcaacatccctactaactgaggctgcaaatgttgcaaacgtcatagtattcaaatggaaaattaaacaaccagcaaaatatttccaaaaaaatttagctgagtcaagccttaaaccatacataaaataagtggttattgaaaacaaaactggaatccaaagatcttctgtaataaatttagaaattcttctagctataagaaaccctggtactgagacactattctccattctttctctatcaaaaactttcaaatccgacgtacataacctataagtttcatataacagaaacaaataacattgcaaagatgctgaggtatataatgaagattgcatagatcttacaccagcaactgaaagatccggtttgaaaaacaaccaaccacacattaaacccaaaaacaaagcttcaaataaaatagaaaaccacccaattggatctctacactgcaatttcaagttccttctaatcaaaatgttcacttctcttataaatggtgcacgtcctgtatcaatgaacacatcacgttctttaacattctgtttaatttctaaagtcatagcatcaatatccggaagttcattcattttttccttccaaacatctgtaattttttcaattctttcagtagactcaatctccttagtccttgttctattatctatacttgttatatcaacataaaaatctgcagggttcactttagtttctggtattatgtaacccaaggagttgaaatgggggaatatggattcatatgaggagccataacatagtcttcccttggatagaatcaaaactgtgtcaaacaatttaaaaatatcagatctaggttgatgaatgctcataataatagttttgtttaaccttttggctaaatgttgaaatgatttacataacaaatatgaattgtaattatccaatcctgttgttggttcatctaaaaataatatagatggattagaaattaattgtaaaccaacacttaatcttctcttttcaccaccacttaaacctttatgttttttatcaccaacaagtgtatctttacattcctttaaacccaaggttagaataatttcattaaccaaattttctctctcctcccttgatgtaagttttggtaatttaagttcagcagaatacaataaagtttcaaaacaagttaaagttggagttaaaatatcctgttgaataacatatgcatttctatattgatttatatcactatcattattatacttaactataccattttgaaccattgatttcttattaatttttctattggctaaacaattcaacaaagtagttttacctgaaccactcccaccaacaatacaagttaatgaatttgacggtatatcaaaagacattgggtataaaattgtttttattgaatcatttgattctatatcaggattcttagcatttcgtttaccaaaagaaaacattttctttctttgaattcttgaaccaatggataaatttcgtacagtgatttgaactttacgtgttggtgtgaatgaaatgttttcatcagtatatcgtaaataatggtctaatcgatcaccagtgtgatcttcaccggacgaagttgaagtattgtatttttgaacctcatgcaagtggagactatcccccttgcccatatctaccataatttataccttatattagttcaataaagaatatccttacaatatatattggcacaggagaaagagtttcaaattgatgtattcaacgtttaaaataatttcatcccagccgcattgtggggattgatcgatagtatcagcttcttatacaatttaatcttggccaagttttaatatacacattctataatttaaaccacactataaagataatatacactatatactctggttagtataaatatattaaccaaacccaatgctcattaagtaattatcttggatttggtttgatatttcttatgcagttgtgctattgtgtcatcgatttctttttcaggcattgaactttccaatggtttgttttcatcgattccaagaggtgttgatactggttctaacactggtgtcactactggagtttcaggttttgcttcttcaactttagtaggaggaaatataattttttcagctctttcaagttttaacttggttatcattactgttccttttaatttgataatttcatcttctttttcagatatagttctttggaatgaattgttcgatttacgtagatcagttatcttattttcatttctttcattctctcttttaagtttattaatttctatttgtaatttccgtaattccattgatttatcatcgttattcttagatacactttttattcgttctttaaacatcttattctcttcttgtctctttttaacttcctcaagtaaatcacaataactactataaactttcccattggtgcttttcaatctattatattctttttgtaaattttcattcattattaacagttctgaatatcgttttttaaaacttaattgctcaaacttttcgactaattgtaatagatattcattattattctctagacgtatacaataagataataattcattattctctgcatcaccaatattaaaatcatctaaattgatatttttactactatctaatcttctaatttgttcaaattcttcatttctttcatttcttacagatttataccatttatcagtctcttcacgcatgattcgtaatgtattatcaacagtatcatcaataggaacatattggtcatcatcaatacattttcttatcctttcatgaattttcctcaactcatcgtctgaaaggtaaacatcaccattatctgggatatttggcatactactcaaatcttcgtacatcccccttaaattggcagaatccttcttacggcctgatcgtatccatgtcgttatgccttcaaacatcgtgctgagtaaagagaaaagataaagtaaaagaatgcccacattcaaaagagaaggcgtagagggaaataaaattatatgcagtgcccatgtaaagtacaaagtgttgatatatttggtttaaaacttttattttgtatacgtttaacttaaagtttatgaatgaatattaatttaataaaagcaattacatataatgtttattcatattataattaaaagagaaagagaatgtgatacttaataaatcagtatttccaaccatatgtactacctaatctattatttaaatgttcacgagcagtttgtgaaacaccatgtttttccatataatgagatgcacctcttcctttaatatctttgataattttacttggaacaggttcaagtaaagtttcatcaccaggatgtgcaaataaaacaattgaatatctatctttacccttatctaataattctcttgggaatctaactctatgaattgttgattttaaatgaccattagtccaataacataattgatctgcgatattaacaattaatggagctgcctcattttgtgcagcatatttagcagatgctggaacgtatggtacactttcccattttttagtaattggtgaatataattgtaaacctgattcttccttcttttgaaataataatgtaacagtaccataatcagtatgagcacctgcaacatttaattccttaaatttatccttttcttcttcacttgcattttcattaacaggtgatggataacgtaaaaatctaaatgttgtaccagagaaatgatcatcatgatgtctttcaacaaaccattcatgatcaattccatcaacaccttcaatttctaaaccagctgacaataatcttaaagattttttcaatgcttcacgtaatttaagtacggttttactaattatatccattttatcttcccaaaattcaggtattggttgatttggtatacctgtttttaaatcaaaatttgcaaaattaaaaccttcctttggatcaccataacctctatctaaatcatcttcttctaaattttcaactcccatacctgtataacctgcattatcagtttgaattacacatttatttttttcttctaatggtaatttaaaataatcatgactaaattggaaaagtaaatcaatttcagcttcagtgaaaccatgtccttcaaacattaaaaaaccttgagttgatgatgcatgaacaattttctttgcatttgcatctgaattatcatttaagtcaataatttcaagtttagaaatctccattttttcttgctttttagttgtactcatgattagaaaattaaattatttttgatgaaatagacccttgttcttatataatgaggagctttacaaattagaaaaccttaattagtaaacagctaataatattatcccaaaacaacttaaaaggaaaagaaagcttatatagtaaatcggaccacaaaaaaaaacggataagaatttctttttattaagtggacgttttaaatcaatttgttcatttaataaactttaaattaattacggtgacttctattgataagcaattaattcaattccttcggaataaccgaaaactaccataataccctgaatagtcataaacaataggaagttgtcaattgtaacaagagtaacaactaagattacgaaaagataataaataataataaagtcaatattttgattataaaagattaattatagaatgataaatagttagtcaattaaaaacattagacttatttctttgcagctttagcagcagatttggtaaccttacctgctttgtcaaccttttcaacggatttaataacaccgacagcaacagtttgtctcatatctctgacagcgaatctacctaatggtgggtattcagtgaaagcttcaacacacattggcttggttgggaccatcttgacgatagcagcatcaccagatttaacagattttggatgatcttcaacggatttaccagttcttctgtcaatcttttcaactaattcatcgaatttacatgcaatgtgggcagtgtgacaatctaaaactggtgagtaaccagcagaaatttgacctgggtggtttaagacaataacttgagcattgaatgaagcacaaccttgaggtgggtcgttcttggagtcaccacagacattacctctcttaatatccttaacagagacgttcttgacattgaaaccaacgttatcacctgggacaccttcatctaattgttcatggtgcatttcaacggatttaacttcagtggtaacaccagatggagcgaaaacaacaaccatacctggcttaatgacaccggtttcaactctaccgactggcacagtaccaataccaccaatcttataaacatcttgtaatggtaatcttaatggtttttcagttggtctgacaggtggttcaatagcatcaattgcttctaataaggtcttacccttaacgacaccggaagccttggtttccttagtccaacccttgtaccatggacagttagtagatgcttcaatcatgttatcaccattccaacctgaaattggaacgaatggaacagtctttgggttgtaaccaaccttcttgatgaaattttgggtttccttaataatttcttcaaatctcttttcatcccatttaacggaatccatcttgttaacagcaacaattaattgcttaacacctaaagtgaaagctaataaagcgtgttctctagtttgaccatccttggaaataccagcttcgaattcaccgacaccaccagcaataattaaaatagcacaatcagcttgggaagtaccagtaatcatattcttaatgaaatctctgtgacctggagcatcaataacggtaacgtgatactttggagtttcgaatttccataaagcaatatcaatagtaatacctctttctctttcagcctttaatttatctaagacccaagcgtatttgaaagaacccttacctaattcagcagcttccttctcaaacttttcgatagttctcttatcaataccaccacacttgtaaattaaatgaccggtggtagtagatttaccagaatcgacgtgaccaataacgacgacgttaacgtgttgcttctctttacccattttgatgtaataaaagttttgcttgtctaaaaaagaggaagaagaaataaaagagtaagtaggaaaaagaagaaaaagtggaaaagaacaagtaatttaaagtaaaaataagcaaggggggggatagtcttaaataaaaaggcagcagaaagtgacaatggtgagtggcaatattttcaatttctcactgtgaaaagtgaaaattttttcaaccttcgagaacctcccagatagaaaattacaatggtggggcgagggtcactaactgagccttcaaatgaccgcccactggggggataaaattacccgttcattaatttgcccttgaaagaaaatttaattttaaattttttttttaatttgcgtgactgtcattttacattactgtgtcgctaagggctcatcacttctatttctgatcatcgccttcttttgacacttttgccctcgagggtttgttagttgaatttattgtatcagttctgctttattataaagaagggaataatttaactgtattatcgtatcgtttatttctctattaagtcaatgctgccatgtgttcgtcgtaaagtagcctctttgaagatggtatcttcttctataagagaaccacctttgaaacctttaccaggtcgtagttctttaaaactaaagaataaaaaccctcctttacctcctcgtaataatgtagagaaaagagtagcttttgatgataaaaaaacaattaataataaagttaacaataacattgatactgatacaagtactgataatgataatgatgatataccaattactaaccagtatgaattatttgatgctcctcaggcatacccaagatcaccaaattcttcaatttcatcaattgattctccattagattcaaattcaatatcaattttcaatattggctcaacacctttaatacatccaacacctataacggatagtgcaattgtgcgtgatattgaatatcataaatcagatattaaacatttacagggtaaaattaaaaaattagaatcaaggaaaaaatctttgaaacataaacatcgtagaaatgtaattaaatctttcttttctatatagatagtctatctttataaataacacataaacatataagacagataacaattgacatttatgtatttaaatagtgcccatgtaccatatttaactctattaatttaataaactgaaggataataaaaaaattacaaaatgcactttcctaattcggtaattttcacccttatcagtatggaatcgaaacatgttttgaaattcatgttattatgaaaattgctgcatcaattgatacttttagtctttagttcccataacaactccctttttttttctacttttccaattaaaatcaatcccatatacctcttacaaaactataatgtctgctgctgaacagagagacattgttcgtaacccaaatttaattgatgatcatgatatccctcattatggttcaatcaatataaacaatcatccaaatcaagatctattgattcaaaaacgtagagcttcatcaatgttctcatctcaagcaaaaaatttacatttagcttcaacttcaattaaagatggtcaatatcaaccaattgataccgatattaaaactgaaattaaaatgttgttctcttccgcaatacctttaatgattactttcttacttcaattttcattaactatttcatctgtcttttttgttggtaatattggttcaaatgaattagccgctgtttcattatctaatttattagcaaatatttcatcattcggtttaattgaaggtattgcttcatcattatcaactctttgtcctcaagcttatggtcggaaagattataaattagtgggtttacattcagttagatgtttcttcatgttaatgatcctttatattccaatttttattttttggaattggggtgcttacccacttttagcaactgttatcactgaagttgaaccttgtatcttagctgctgaatatttaagaattttagtttggagtgttccaggttttattgtttttgaagttctaaaattatatttacaagcgcaaggtatcttccacgcatcaactatcgttttacttgtttgtgctccattgaattttatcataacttatttcctagtctggaatgagacttatggtataggttttaaaggtgcaccattagccgttgttattacaaatacattaatggcattaagtttattattctatgctacttttattaatggttatcaatgttggtgtggttggtcatgggatgttttcagaaattggtcaaaagctcttaaattggcaggtccaggagttattatgattgaagctgaatggttagcttttgaaattatctcatttgcatcttcaagatttggtactgaagcattagcagctcaatcaattattacaactatttgtattacagtttatcaaattccattctcaatatcagttgctggttcaactagaattgcatggtttattggttcagattctaaaagagcagcaatgacttcattaagagccgttattatcgttgctattattttcggtattggtacaggtattttacttgcttcagatcgtgaatatatttgtggtttcttttcaactgatgaaaaagttgttaaattagctgctaaagttttaacaattgctgcagtttatcaaattcctgattgcttagcttgtgtcttaggcggtgttttacgtggtcaaggtagacaatatattggtggatatttaaatttattcagttattacgttcttgcattacctgttgcattttttttcggattttatttagaatttgaattatttggtctatgggttggtttaatggttgctttatgttttgtttcatcttgtgaattatatttcgttattaattgtgattgggataaaattatcaaggattcattagatgaagatttagaggatatggataatttaagacaaatattagaaaatgatggtaataattcatcttcaagatcagttttctcagatgataatgaatctatttcattaagaccatcaagaagtgttgctagtcttattgatcataatattttaagcccttcgattaatactactttagtaattcctgatattccacctcaattacccatttgaaacaattattcataagtttagtacaatctttcatttataaacatttttaacaagcatattaagtcattggtattaacaaaacgtaaatcctacttacatgtaaaacatctacaagatctggaggcggtcttctggatctgtaacagtaatgtgtgctaacttaaatctgcttatgtaataactttatagctagtttcatgattttgataaaaacttatcgaattgcttagaccccggatactgagcacacaacttattaagaggttgtatcctggataaacataaacgaacctaacttgaacactttatagaagagaacatgtcttggtttggatcagctaagtatccaatatttgatgaaaaagttgaaaaggcaacatctgagtcaattccaaatggtgatattgattttgccactgcattagaaattacagatttaatacgttcaaagcaagttccagcaaaggaggcaatgcgtggattaaagaaacgatttatggatgcagagaatattaatatgcaaaaatcttcatttaaattaattgatttttgtataaagaatggtggtgaacattttataactgaaatctcttcaaaagaatttatggatccattaattataatgttaaagaaagattcaattgatcattcattaaaacaatatatgttagaaaatattcaagtctggtcaattatggtaagtacaaatccaaaatttgaatatattaatcaagtttataaaaaattacaagatgatggtgttgaattcccattaattaaagattttatagattccaatttaattgaatcaaaagttgcacctgaatggcaagattctgatgcttgtatgatttgttcaaaattatttacatttttaaataggaaacatcattgtagatcatgtggtggtgttttttgtaatgcacattcatctaaaacaattgaagttcctgaattaggtataaccattccagttagagtttgtgataactgttatgatgatcaaaaggcaaagcgtaagaaacacaagaagtctaaaagtaaatccaaaagtgtggatattaacatcaatgatgaggatgaagatttgaaaaaggcaattgaattatcattaaatgcaactgctaataaaaatgaatatataccaaaatctaatgatagaaatgcaatggtaactcaaataaatgaagatgatgaggatgaaatgatgagtgcagcaattaaggctagtttagctgagttacatgaatctccaagttttgaaaaaaaaattaaagaggaaccaccaaaggaaacaacaaccggattatattcaaatttattacttgacaagtctgaggaatcttactccaagtcaacaactgaagtacaagcatatcataataacacacaaccgccagcacaaataccgccaagttatcaccaacaaatagaacaacaagtaccaatacctacttatcaagaaaaaccagcattaaaaggtggcgatgaaagaagtgttgttgaattcgttcaattgctagataaaatcaagtcagggtcaagtgtgaacaatgcttcattactcaaactaaaatcagatttaattttattacatccaaaaattacggaagaaatcaattatcaaaactcacaaattgatcactatcaaactttattttctaaattatctgtgataagtcgattatacgatgatattttacaaacaagattcaaccaagagcaagaaatgctcaaaatacaagctactcaacgttatgcaccaagtcatgtaccaagttatgcaccaagttacgcaccaactccagtgcaaaaccaatacttatcacctcaagagacatttggatatcaaaaccctcaagtatttgctttacaacaaactggtgctaatatacagcaacaacctaattttcctatgaatcaacaaccgtcacacacacagtcatcacaaaatttaccaccacaatacttacaacctcaatactcctcaaccccacaatatgctcagtcaccacataatcctcaagtaccacaattaaatcaatatacaggtaatttaccacccgcaaatattacacagttgaaagaaacaaccgttcctacagacagatctgttcaacaacaagtaactgcacagataacacaaagagatgctgctccaatttttgcatcgctgaaaaatttgagttacgctaaagtgacacagaatactacaaatggttcagtgaaagataatattgaatcaccaaaagaatctgcagctgaaccaacacaagattcatctactccaatcaccgaaaaactgccggaacctgttaaagaacctgttccagctaccccagttgcaccagttgaagaaccagttaaaccaaaagaacctgaaattgtcaatttaattgacctttgagttaatattattctttcctttcataagccctgtataacatttacatgtaacactaatcgacaattgaacttagaatttgtaacaccttaaatttttaaaactgaaggctcatcaattctcgctgatctgcgaaatgtaagaaaaaaattgttcaccgacattaacggaaggcaaaaaataaagttaatggctccccttaaaagcattcaattttaaccatatcattgaacttaaaacaaccaatatggaacaaaatagtgatccatatacattgctaaaaaagtttttgctaaacttagcacataattacaattacaaatttgataattctgcaaaaacatgtttaaaggatacaattacatatttttttaacattcctgaacatgacttgaaaattgatcatactattcattatcataagggaagaacatgtggtcaccgttttgttagaggtgaaacatgctggagatgcttaacatgtggctatgatgatacatgtgccttatgtcagttttgttataatgaagaagatcatttaggtcatgatgttcatagctcaacaattcaacgtgattttgctggatgttgtgattgtggtgatgaggaagcttataaaggtttgcaatgtcctctatacactcaacctcatgaaattcctattcaaacagaaataaatcaagaagttttagatcatgtttcacgtattttaggtatccttttagattttgttatcgattttacaaaccactcattatcttgtttgtcaccttccgatagagctgagaaaataaagttacgccatcaaatgtgtgctctaagtcaatcagtttaccaaggaatcgataatgatacaaataaatatggtttaattttatattccgatcaagttcatcaatttagagatgctgttcaaagaattagaattgttacaggtaaagtcaaagagtatgctgaaatgattgcaactagatgtaatacacatggtagagctgttgtgatgatttctgaaaatttgaatgatttgttaagaaaacaaactttgttaactacaactggtttaactgcctgtattaagaacgtccgtgaaatatttcgtgaagaaatgtgtgatgaaattatcagctggatcaatgactttacacaatccaatattgtgaaatcgaatgttgagctattagcggtgatacctaaaacattcttaagtgcttataatccaggatgtatgaatcaatggatggatattttttatgataaagtactgataaatcctatgcaattgcgagatcgcccaataagtccaacagatttccctgctattaatttcaatgagaacaataatgttattccgaagtttgattcaactcctgtttgggatttacctgaaagtttgaaaaatgattgccaatatcacgaattgtcaaaagaaaagttcaaaacttacaaaggttcaagattacaatttttattaatttttgatatcagattttgtaagacaactagaatcaatttacattcaatttacattccatcacttgctaaaaattgtatttatagtagaatgttggttgctcaatttcttgatatttatgatacaatattgacttcatttttaatggttgatagggagcctgaattatctgttatgcctctactttctacacaattgttcagttcaccatcaaactcatctttaattttaaaacacggtgatgcaatcaagatgataacaacaatccacagttatatactaactggtaaaactctgaatatactacatccgagtgaaaaggaaaatctgccccactacaacattacattctctacattgaaaaatagaaaatgggctcatgtattattggacctttcctatataataaccagaaatccagatattaataacattttcaggttttttgtttgttttccaaaatatgtcaactttttggctgatttccaaggtaaaccaactttccaaagagaagcagagaagcacgttgagtacgaaaatcaagaatatacagtatactttaatgccatgtcagtcatatcacatttttcagaaaatgttggtaaaatcttaaataaaattccaaagcaaagattgttgtcgcagggaaatccacttgatatctggtataattcatcttctaatacaatgataaaaccattcactgaatcagtatatgttatgattattcgtagcatcattaattcctcatttgtcaaagtcaaaacttaccctccacttccagttccaaaaccaataaatgacgaaaaacaagatgtgattcagttcaagccatgtaaagaatttcctgatttcaatgtggtaaaatttgatgttgccaaagatcctgcatcatttttacacccgttacatgttatgctttcttggatgattgaaatggatcaatctatggattcagaaaaggcaattttaaacttaatggatattattcaaggagaatatgagttttatttgaaagatcaaaataatgtgtataaacatcctaaatatgaaggagtaatggcagttttcgatatcccacttagaaaaattgttttagtttcacaaataaaatctggtttatgggtacgaaatggtgtttctgttaaaaatcaaatgacactgtatagatatggaagcggtagagagtttggattcatgagagatttatttttatgtcaaatatacgttggttactttaggtatgctcaattggtttcgcatacaatttttgatagatggatgctgctcccttggttaaatgatgacatgaaacaatctgcataccatccacaacacataaatggtcttttagaagaatttatgttgtttctgattaatttagttactgaggatttacatttacataaattgagtgcagacgatgttacatttttaatgattcaacatgagattatacatgcaatttgctttgaaaagaagacttacaatgaaattgttttactcattccagatcatatttgttctttaaagaaatttccaattgcattcaaatattgtgttgaacctgttaaagaatatacagatatttctgaagaaaagtattatagattaaaaccacagttttatgacaccattgatccattttatatccacttgaactcaaatagaagagaaaattgtattcttcaaatgaaaaagcacattagtaaacgtgataaagtactggaatctgaagttgtcattatgcccaaaaaaattgattggtccaagagtccatttgcaagagttacagatattttacttgatgaaaaggtattgttatgtatatttaaatcactgcaacactgcaaaaacaaatttctgaatgctgaagacattagtagtaaacaatcagtgaaggaaaacaatgaatcgttattgggtctggtattacatttaacacatattactattgatcataaaaatattatggatgttaaaccagttgaattgtctagaatattagtcgaaatttcaaagatttatgagtcaaacaaagttgatgaacattcagccaaaatgaaatttgtgatgaaaaagatttacaatattctttcaaagatggagtttgatatcgaacagaatttagtagacttcaatccaaatatattagatgagaactataattttaccgatagtgatattaaatccatttcagatttatcaattgatagaaagaaaaagcttgccaagaagaagagaaataaacttttagctaaattgaagaaacaacaacaaaaatttgctgaagtaaatgtgatggatgatttaacggatactgcaactattgatagtggaagtgatatttcaagatctgttgattttggatctgagtctgtttctagagctgaaagttcctatgatagaccattaacagatggtgattttaatatgtcttattttggaaatccaaacgaaagatccattgttgaaaacgatgaggaaagactattgtctttatttgaaaaaaatctaactaatgcatccgattcatttgttcaaggaaataaattaaatggttgtatcccaaatggtgggtttattccaaatagtgcatccaatgagaatatattagatgatgacgaagaaaaatgtccatcatggaaatttcccgaacatacatgtcttttatgtcatatgccagccgctaatgagaatgaagtatttggtattttcagttatatcacagaaactaatgttttcagatatgttccgccatatgatgattatcatttttacaacgcatttggtggtaatgttaatttagatgaagttaagcagaccaatgaaagtttggaacaatatacaagtgaagttgagaaagaacatgttattggcccagggttacctgataattatatcgatcctaaaagtataggatttactgaaaatgctggtgtttttacaagttgttcccatggtatgcatcttcaatgttataaacaacattttgaagcatcacttaataaacaatacacacaaattactagaactacacctgagaatatcaagagaagagaattcagttgtccattatgtaaaagtattaacaatgttttcattccggtgttatacaagaagaatagtaagaagttttatgataatttccaaaagaaaattgacattgaactgcttgataacgtcaagttatctgatagaattatgaaagatacaatgatttatcatatcagaacaaacattattgaagaattgaaaagtaattttgaaccaaaagattggtttataaatgaaagaattggtagtgatggattaaagaaatataccctactagctgaatctagaatcccattaatattgcaagaatgtttaattgatgttgcacatgttgcaccaccatttgattcatttggatcaagtatttatcgtacaattgaatcattggaaatttcattaagaggagaaggttatgaggatgttccaaatggtaagaaaaagaaactattaatcaatcaattgaataatagatcaattacaagtcttagagtgtggttacaaatttgtgagattatgaaaacatcactgggtattaaaagagatgataatataatgaatgaatctaatgaagtttatccacagagtttaattggtatgtattataatttattagaagataatgagttaatatttagtggacaagattattttagtagtttaatttattgtgatgaagttaaatcgttgggatattcatttcaaagattagttggtgtattttttatcaaacatattaaacaatcattaatgaagattatgataacattaatgaagagaaatggacatattggagatgaagaaagaattgaaattttgaaaacacaggtatattatggagatgatactattatgaggatgataatcaataagttcatgaatattgaatatgaagtcattaaatctgaattaattgatgttatttacagtatgttaattaagatgattacaccatttttaagaaaagtattaatattaagttttgccaaattttccagatttgaagatgataaaattaaaatgaatgaagatgatcgtgaatgtgatagaatttgtgacgttttaaatttaccaagaattgatgaaatattagagcaattagatactaaaatttttgaagatgttagttctgataagagggaggaacttttcaatagtagaatgaaatatccaagtaaggttaaattaattcatttaccaaaggaattaaatcgtttttacactgaatattacaataaattaagggaggaagatagatatgatgaaccaggggtatgtttattctgtgctgaaattgttgatatacagaataataggtatggagatgaatatggatcatgtacaatgcatttaaaatacgaatgtattaatggaggtaaaggtatatttttcctaccaagaaataactgttgtttattattagataatggtaaaggatcatttattgatagtccatatagagatgaatttggagaagttgataaagattgtaagaaaggtcataatgtttggttaagtgataggaaatatgatgaaatggagaagaagatttggttaacacataatattcctaatgttattgcacaaaagcttgaaaattggaacgatatgggtggatggtcaaccctatgataagaacaatagtttttaaatttataaattggtctgtaatttactttaacgaagtgtaaatgaaaataacagcgttaactagtgtgtaaattaaccctattgaataatagaataattaaatcaaattaaatcaaattaaattaaataagttaaaacaatagtaaaatgaacaatttctagtaccaagataatagaaaacgccatttgtgaaacgcgttgcgaaagaaaagcgcgttttgcttgtttgtgttttaccgctttgggggagaaacgcggtttgtggactttttttctggaacgatattgatcttgtgtttttcaaagataagaagttgatctcaatgaatataaaagagcacttgtatccacttcaattgtgatatgtcttaattcctctcaactatttatttcttttagtatccaaagtcaattccaacttcagtcactctttaaataaataaaaatgcaattctcaaccgtcgtccttttcgcagcatccgctttagcagcatcttccactgtcactgaaactgcactttcaactcaagttgaaaccatcacttcatgtggtccagaagttactgattgtccagcaagagaacacggtaactcaactattaccactgcttcagataatgcagcaaacggtgcttacggtaactattacgctgctggtgcagctgctttagctgctggtgctttattaatgtaaagttcttagcccagtttagcttttacttacaataaaaaaataaccacggttttaacataattctgctttgatacctctttagaaatagttatatctatagttttataattataatcataatcataatctaatttaatctattatactgtattagtaccttataattacgtaataagcaacgcatttctttaaattgaaattttcttttgaatacgtgccaaatctattggaatcattaatctttgatgattgctgcttatttctctttttgatttgattctactgcacaatcatgtcgtacaatgttgtaagactgaaatatcttataaggagaaataaacgtgccattatactggctacaatctttggtattgcgttacatttcataattcaatcaacttatttctctcagcctcaatttgaaattgatgattcttatgaaggtacattcagaggtaaataccttaaaactattaaatcaactgatgaattacaatctcctgaattttataataaatggtcaataataggttatttagatgatttagttaatgaacctattgaacattcaacttttgaaaattcaattgatccattctcaataattgaatcatatgaacttgaaaatacttcatttatttataatcaattatcagttcttgaacgtgcacaattttatgaagattatattttaccattgagtaaatatgaatttaatgatattcaagatattatctataaagatgcattttacagtaaaaaatttattaatacaagattaaagaaatggttaaaaattaaacaacatttaacaactgaagaattagaattattaggtattaatgatgaatggtttaaaaatgttgttaaagatattaaagaattaaaattaaaacataatcaaatatctgcagatgaaattaaaaattcttttacacaattaaaatttttttcaaatatattcttaaatactaaacaatctgaaactcctgaacttgataaaatttgtacttcaacttcagaaaaattgtttccttggttaagtgggttatatccaaaattttatacttatactaatagaatggaaaaaattgatgtaactccattcactcaaaaggattcaacttgttttattaaatcattacaacaaaatctccatggtaaaggtattgtaattacatccaataatgcattaattcctgaactttcaggtttattatcaattttaagattaacaggtaatcaattaccaatttatgttgttcataataatgatttatcacttgaatcaattaaagtattaaataatattgctaatgaaccaataatgaaattaccaaaagattcaatgccattaaaaatcccaaataaattaaaacctttaaatattatttatattgatgtttcaaatacaattaataataaatataaaaaatattttggtggttttggtatgaaacttttagcttatttatttaatccaaatgaagaaatgattatgttagatactgatacagttattgttgatgatataaataaattttttaatgatgaaaaatatctaaataatggtgcttattttttcaaagatcgtgatgttaattcatttatttatgaagggctgatggattattttaaatcttatttaaattatgataaagaatcacattatcttggtatggaacgtgttcaaagtgaagtattagaaaatagatttttcggttcatttgcacgtcattttatggaaagtggattatttgttattaataaaaaggaaaaatttgatggtgtaattgcatcaacaatgatgcaaatgtttaaattatttacaggttcattacatggagaaaaagaatttatttggttaggtcaagaaattatgggtaataaatatgaatttaatgaaaaacctgcaattgcaattggtgaattatcaccaaatagagaaggtttaacaagtaaagaattatgtacaacacatcctgcacatatttctaaaattaatgatttattatggtttaattcaggatttttaacatgtaaaaaatttgaatcatattataaagatattaattatgaacgtaataaaggtttagaattaattgatattaaaagaaaatatttatcaccacttcatataactcatggaattttaccaccacctgcagaatataatattgaagttaataatgttgaatcaacaagaggttggagaatgacacaagaatgttcaaattatatgtggtgtgcatatgataaaattggtattgaagaaactagtatgagtggtgaaattattgaatttgatgaatctgatacaattaaatgggattatttaggtaaattatgggttaattattataataaaggatatattaaaaatgatcatggatatattgaaggtgatgcatatgatgaattaggaattgataaaattgatatatttaatggtgataaatcagttgatgatgatgaaaataatgaaattaaaaatagttatggtaaaagtgattatgatgatgatgaggaggaaggggaggaagagttagatattggagtttctaacactttaaaagaagaagaacaagtacaagaagcaatggaagaacaaaaagaaggtgaaatagatgccgttaattagccaaattaagaaaatatattatctttttataaattaatttataactttaaacccgattaatctgtttttgttttgtttttattctaacaaactttccaaatttctaatgcaagtatattaaattttgaagaatcacttaatggttcattattaaaagtttcaacagtatctgaagcaccaatttgaagatttgaatcgaaccataatccgaatttcccatcacctgaaccaacacttataaaatgttgatctgaataaattataaaatcattaattcctgtataattgaaaactttgagtgaattatcattaatatcctttaaattttttttccaaaggaaacaatctccattaccataaaaagttttaccttcttgaatatgtaaataatcattaatataagcaccgaaaatattatgatgagtatcttgtacaataattaaataaccacgacgtctatttttattattttcactatcatgtttacaattactatataaagtttgtaatgaagttccacattgatcaattgaataaactaaatgccaatcatgattaatctgtataagagttggtaaattttcccttattttttcagctaattcaatattaagtaatttatgtgatgttgaatctttatatccatttaaaattatcggagttaatggaggatcttcaaatgaaattggctcaggtgttggtgactttgattgtgatgattgtctttgaaatgctgaacgaattctctgtaatggagatgccattgtgtctatgttttcggtgtctaaagagggggcatcgaattagtgattataattaaatttgtaatgtgttgcaaaaaaatttacactacaaataatcatgaaaccttccttttcccttatcttatacatgggcaatgaagttaaatgatataattgaactattaaagacatcacaagagggtagtgggaatgtagttaaagcacagggtatgtcattagaatgggttttatcctctatgatgtattcaagtatttggtgttttatacagttagtaattttttattatatgaagggtaaatatcctaatttttatcaaaacggtaaaaagatagaaataaagggtaatgaaaatattaatagtaatagtaataataataatatctctattattaaatacttacaatatgagatacgtaaaaagggagatgtaattgaatggcttgatattgagcaatttaaacatgataatttaaatggatatttattcctaagatttgtctatgttagtttatattttattgttggattatgtgttatatgtattccaatacttgtaggtgtaaattatggaggtgaaggagattgtactggtatggatgtaatttcaatgtcaaatattaaagatgataatagttataaatatgttttccattttggagctgcaacgggtgtagttttatggtttcattatgtttatggacatgaaagtagatttttaaatgaaattaaagaagaagaaggaaatgatgatataattgaagatagtgatgttatcattcctaaaattattaaaaataagccaattaatagaagtagaagaccaccattaattccaattaagggtacatcaattagtattattggaatatcacctcgtggatggtcaaatggtaataataataatacttataagaaaattataccaataacaccatcatcaccaccatcacctgcatttacagcaatttacaaggcattttatacagtaatttcaataattatagttattgcatgggttataccatcagcagcatcggcagtacttgcaggagagatatcacaacaaattaaaatatttggaccatttacatcatttgcagaatgggttttccccacaattgcattttcaacaattgcaagtattggtagagaaatgatgattataatggataaaggtgttagaattggggataaaaatcattggatgtttttatttgatacagcacaattaataatggttgtatttggaggatcaaattatgataataatagtaataagaatttaaattttacaaataatttattagaaagagctacattagcaggtaatttctttatggcatattttgttgttagaggattaactgtattaaatggtgcaacattaagaggttttgaacttattaaatatttagtaattaatgataatgatgataagagttctaataaaatggaaaacacatattgttcatcatatgccgcaatatgtgttgcagtttgtgttacattattaacatcaattacagcaccaattgtattattatttgcagcaattcatgcaacacttgtagtttcagcacaaacattttggttaggacatgttaatgtgaagaaatgtaataaaggtggtttacaacaatacagagatgcaattttacatgttaaatatggactatattatatgttagtattcctcatagcagtatttaccagagttgaaccagtactttcattcctaatggcaacagttgccatcgtttcatactgttcatggtaagagtataagccaccataagtgtttataaatagaaaataaaacacgcctcctcgcgaggctggtttcacaataacaatagagagacacgctatttccccttattattattatctctgttttgctttcatctgtgctttgttcgtgttctttcagctctgcatctggctatttaataactgaaagaacctgtattttgtatataagtattacaatacttcagtattaaacctttgtctttgcttttaattatttagtaagaactaatttcaataatcaccacacacaagaaatgcgtctctctggtttagttccaataatatcatatctttctacagttattgcagatagtacttctgcaactgaaattacaacttgtaatccattgaaagcttcaaattgttcacctgatcctgcattagcaactgcaattagtaatgatttccaagaatcttcatcacattatttaccttatagaacaccatctaaaatttcttattctgatgatggtttatcattaacacttgctgaaagatttgataatccttcacttgtatctgattattatataatgtttggtaaagttgaagtttggcttaaatcagcttatggtcaaggtgttatttcatcattttatttacaatctgatgatttagatgaaattgatcttgaatggtttggtggtgatgcatcacaaatgcaatcaaattatttttcaaaaggtgatacaacaacttattcaagaggtggttatcatgatatggcagatccaagatctgattatcataattatacacttgattggacaactgattatgttaaatggtatattgatggtacattagttagaactttatcaaaggatgatcctcaaggtttcccacaatctccaatgagattatattttggtatttgggcaggtggtgatccttcaaatgctgaaggtacaatcgaatgggcaggtggtttaactgattattctcaagtaccattttcaatgcatattaataaattaattgttgctgattattcaagtggttcaagttatgtttatggtgatgattcaggtacttgggaatcaattaaagcagttgatggtgaagttaatggtagagtaagtattgctcaagcagaatttgcttcacttgttaatggtaatgttccaagttcagattcaagtgtttctaaatcttcatcaattccatcaagttcatcatcaactttatcatcatcttcatcatcatcaagctcctcctcctcctcctcctcctcctcttcttcttcttcaattgaatcaacaacttcatataccccatcaactacaacctcatctacaattccaagtcaatcatcatttattgatgatgattctgaagaaactgatgataatgaaatttcaacttcatcaactatttcatcaacttcatcattatcaccagaacatagaagtaaaacagtttctctcaagagtgaatatttaacatcatctactagatcttttgaaactagaactacaagtacagaaaagaatgaaagtgagtcaacaaagactgaatcacattcaaaatcatccacttcattaaaaacttcatcagcaattgaagtttcatcaaacattgcaccacaattcaacagagtctccaactcatcattcacagcccttttaatgtttgcattatgtcttttctaaaccattcctgtagttattctttaaatctttagataatctttgtattttacctttaatataatatatccctccatactaaatcccaatgaggcaactcacgcgagacgataactgataaaaaaattttaccactgaaaaaaaattttcattgtgttatactggttttcatagagattttaaagtgttatatttaattactacagacaaataaggtatgagtgatattactgaaaagaagagaaaacatgacaatgacagtgtttccaagaaggaaaagaaagtaaagaaggataagaaagagaagaaggataaaaaggaaaagaaagacaagaaagacaaaaaagaaaagaaagacaaaaaagataaaaaggaaaagaaagaaaagaaggaagaatcaaatgaagaatcagttgatatcattgaaactccaattgaagaaatcaatgcattccttaaggaaaatgaaattacaattgaaaatggtgataatcttaatattcaaccaattataaattttaaatcattatcaaattataatattaattctaaaataagtaaatgtcttaataaatttgataaaccatcaccaattcaagcaagtgcatggccataccttttcaaaggacatgatattattggtgttgcagaaactggttctggtaaaactttaggttttggtgtaccagcaattaatcatattgttaaatcaaataataaaaaattacaagttttagttgtttcaccaacaagagaattagcaacacaaatttatgataatttaaaggaattaactgattcaacatcattaaattgtgtttgtgtctatggtggtgtccctaaagatcaacaacgtgaagatattgctaaaagtcaatgtgttattgcaacacctggtagattagttgattttattaatgaaggtagtattaatttaaatgatgttgattatttagttttagatgaagctgatagaatgttagagaaaggttttgaagaagatattaaattaattattaaaagtgttaaaaatgaaagacaaacattaatgtttacagcaacatggccaaaagaagttagagaattagcaaatggatttatgaaaaatccaattaaagttaatgttggtaatcgagatgaattaacagcaaataaaagaattacacaatatgttgaagttattgatccatatgataaagaaaagagattaattcaattattaaatcaatatcaaagtaagaataaggatgataaaattttaatttttgcattatataagaaagaagcaagtagaattgagagatcattaaaatataaaggatttgaagttgcagcattacatggagatttatcacaaattcaacgtcaacaagcattagatagttttaaaaaaggtgaatgtaatttacttttagcaacagatgttgcagcaagaggtttagatataccaaatgttaaagttgttattaatttaacattcccattaacaattgaagattatgttcatagaattggtagaactggacgtgcaggtaagacaggtattgcacatacattatttacagaacatgaaaaacatttagctggtgctttaggtaatgttttaagaggtgcagatcaacaagttcctgatgaattacttaaatttggttcacatacaaagaagaaagaacatggtgcatatggtgcattctttaagaatgttgatatgtctaaaaaggcaaagaagattacctttgattagtttaagtagtttgtttatattatattatgtataaagatatgttaagaagatacagtaacccttttataaaataaagataaagagaaggaaagtgacttttattaagtgcacgtgtataataaataaatttagaaaataatcatgttgagaacaataggttttttattatctcagtttatattcggttgtcattaataaactcttctttctgccttttggcaggggattcactgtggtatactcttcaattggtaaaggaaaagagaatagtagtacagtatagacagtatgaaatttggtgaaactttaaaatcttcacttattaaagattacgcttattattatattaattacgatgaactgaaatatgctgttaagaaaggattggaaaataataatggtcgttggaataatcaattagaggaacaatttgttgacactttacaacaagaattagataaagtttatagttttttcaaattaaaacacaaagaaattttaagaagagttaaagaaattgaaagtttagttgaaaaaactgttcaagcctctaaaaatgtaactgatattcaagattatgaatattttgaacaagatttccaagatttagaggaagaattatctgatataattgctgatgttcatgatttaaatacttttacaagattaaattatattggtttccaaaaaattttgaaaaaacatgataaattaactaaaatgattttaaaacctattttccaagcaagattaaatgcaaatccattttttaaggataatttagatggtttaattgttaaattatctaaaaattacgacttagttagaactaagggtaatcctgttaaaggtgattcatcagctggtggtaaaatgcaaaatttcgttagacaaacaactaaatattgggttcatcctgataatataactgaattgaaattaattattttaaaacatttacctgttcttgttttcaattcaaataaagaatttgaaactgaagattctgcaatttcttcaatttattttgatgataaaaaaatggatttatattatggtagattattgaaaactgaaggtgcagaagcaattagaattagatggtatggtggtatgtcaactgaaacttgctttattgaaagaaaaactcatagagaagattggactggtgaaaaatctgttaaggcaagattcccaattaaagaatcaaaagttaatgatttccttaaaggttcatttactgcaaagcaattatttgaaaaagctagaaaagatggtaaaaaatcaaaagaagaaattgattcattagagagattagctcaagaagttcaatatagagttttaaaggataaaatgagaccagttatgagaactttttataatagaactgcatttcaattacctggtgatgcaagagttagaatttctcttgatactgaattatcaatgattagagaagataattttgatggaattgatagaactaagggtaattggagaagaatggatattggagttaatttcccatttaatcaattacctgatgaagatattgaaagattcccatatgctgttttagaagttaaattacaaactcaaatgggtcaagaaccacctcaatgggttagagaaatgatttcatcacatttagttgaagcagttccaaaattttcaaaatttattcatggttgttcaactttattacctgaaatggtttcattagttccattttggcaacctcaaatggatattgatattagaaaacctaaaaaggatgcaacttatggtattattagtaaacatagattattagaagatggtagtaatggtggacaaattgatgaagaagaattaattggttcatcaacaaattatggttcagttcaaattaatgaatctcataatagaattgaagatgttagtaataatactaaaaatgaaggtttattagctcctttaattgatttgtttcaaaaatatacaaaacctgataattcatttaataaagttccagatggaacgatttttgaaactgcatttacagctccaaagggtaaaaaaattgcagttccagttcgtgttgaaccaaaagtttattttgcaactgaacgtacattcctttcatggctttcaatttcacttatatttggtgcaactgctcatactttattaaattatggtgatattatttcattattaactgcaggttgcttttatttaactgcaattttaactatattatattcttcaggtgtttacgttttcagagttataagtattcgtaataaacgtgcagttagatatgatgatcaaataggtccaagacttgtttgtggtgctcttgcattttcagtttttgtttctttcctatttagatacttgaaataataataataattcatttctattcatatatacactttcttaattaatttatatcaaaccttttataataattgtacatttcaaatagttaaaatggttattcccgtgatatcccggcgataagatttttttttttaaattttcatcacatcatgcaatccaattatcttttaaagagatacaatcaatcaaaagtattacaatagaatatatagataccatgtctggagatataatagaggaatgccatactgtagcacctgtaatagaatttaattgtgatacagaaatttgtgaaactaataatttcacagaagatttacagacaattcagaaaactgactctgattcagaattaaacaatacttcaacatctaattttaaagatacaacagatttagaacaatatttatcagaactattaataggattacagaaacaacaagaacatcaacaaaatgaagtattacaattaattatacagcaacgtcaagaattacagaacaatccatcatcattaaacaataataataataatattaatccaccaatttcatttaatacattatcaccaccaattgtatcatctgcatggacttttacacaaggtttaataataggtcaagtatcagtaattatattaattgttgcatttattaaattttttgttttcactgaggcaacaccaactcaagcaactaaaatacccacaaagaaggatagatcagtaattaaaacaagtaaaagtgatgaaattgatttatcaagattgaaggcaactccattaactagactcagtgcccaaaataataataataataataatattcctaataatacaccttctgttgaagatggaacaaaattaaaggatgatttaactcatttaaaggaagttaataaagcattaaatgcaggtaaagtaaatttagattttgatagtacattaaattcaattttagagaaaacttattatgatgttaaaactcataaacctgaatcattagattggtttaatgttttagttggacaaattattgcacaagcaagattagaggcattaattgatggtaatatttatgaatcattaaataaagcacttaattcaccaccagttttacaatattttgatgcaattaaaataactgaaattaatattggtgatgattatccaattttcagtaattgtagagttcaaaataatgaaggtagattagaggctaaaattgatgttgatgtatcagatacaattacattagctgttaatactaatttattaattaatcaaccaaaatttatgagtgcaagtttaccaattaacttagctatatcagttgttagatttagtgcatgcttaagtgtatcattgattgcaactgatgatgatgattttaatgttgaagataatgagcatggtaatgcaaataataatgtaaataaaaagaaaaaagcacaaaatattgataataataataataatacagataattcaaagggtcattcaattgcattaatgttttcatttagtcctgattttagattagaatttgatattaaatcgttaattggttcaagggcaaaattagaaaatataccacgtattagttcaatacttgaaaatgttataaggaaatggtttattgaaagatgtattgaaccaagatttcaattaattcaattaccttcattatggccaagaaagaaaactacaagagaaaatgttccaactgaatagagtaatgtatatagagtttttattataagaagaacatacataatttagaaaggatcttcaaaagcatcttcttcatcataatcatcatctttttcaaattcataaacaattgaaccaccaacactacccatactttgttgagcttcaagaaatggtaaatcaactttatctctttgttccttttgttttttagttgtacctaaattaaaagttgttaaattttctaataatgattcatcatcaccagttgatgcaggatttgcagaaattatatattcatattgatgattaattgaatcaattaaaaatttataatctaatgatctaccagattttcgacgataagttaattctgtataaaatttattttgatgaatatctcgtatatttaatgggaaatttggaccattttgtaaaagtaaataataatctgaatctgcatcattaaaatttattggtttaatatcgaaaacacatgatgataaataatgtaaatatgaataacttgaaggtttatttttattatttgtatcaattaatgatggtatatcttgatgatatataccatatataatatttgaaggtttcattaaaagttttaataataaaacaatttgatcatttggtatataattaaatgaatcaataattataagtttttttctatcatcaggtaaatttgataaattttgattaattaatttttcaaaatctttatctaataaatttataaatttatcttttgataaattaagatatgatggtggtaatggtgtctcaaatgataaataaataattgtcaattcaggattggtagatttagccttattaactaattcatttgtcaaaaatgttgcactttgaataaatgtatcactaacaagaatgaatggacatgattctctcaatgagaaaatacgatttagtaaaactgttggtgaagcaactgatgctgacattagttattgaactgggttattaaaaggaaatgaaattgatgtctttagtgaaataaatataaaatttgtcaatattcatgattcatgttacgtaaaattttccatgaattattccattatgtctatcttctttctcttgatttttacaattaaattactagcttaaatagatctataaagttatgaatatacggtataatatttaatgattattgtatattataaggtttgtattgtgtacaatttaaaatatttgggaaatttgtaatttcataatttggatgatgaactttacattcaataaagttatcttcaagtctaccatcttccttacgaactttttcataatcacaataataagctttattaactaaaaaagttatctttctactttgaaattctaatacatcaatatcatttgaaatatccatttcttcagttttttcatcttcataattatcagcagatgcaattgttggatcataacaattattttcccaatatttaccttcattatctaatggaatattaggtacattaataatccatttattaactttatcagtatgatgcatattagattctttccttggattaaaggtatccggaaacttagtatgtaatgatattgacgattctttttggtatacgttttctgtattatttttatttttattagtatcattgatattatcattattatttacaattacaggtgatgtaatatctacattaaatttaccatttccaatattaggagacattgcctgagatagataattaattgtatgattaatatcattactattagtcaatggagttttagttttactctgaggtaatttagaagtcattacaaaagttttattccttgctatcagaagaataataagaatatcaacgtaataagaaagaggttaataacagtagaggcagtattaattaaagaacagggcaatattctataagtattatcataatggccgtcccatcgacgtgtctgggctcaactttatttttcaattattacacgttagtattatgcatgggatggcaagacatgttaatcattatttaagattcgtttcttttgtgcaatagatagttagagagaatgggtgttcatggattgtgggagattcttgcaccctcttctagacccgttagagttgaagctttaagaaataggaaattagcagttgatgcatcaatttggatttatcaattcttaaaagctgttagagataatgaaggtaatcaaatgaaaaattctcatattgttgggttctttaggcgaatttgtaaattattatattttggaattaaaccagttttcgtatttgatggtggtgtaccagttttgaaaagaaaaacaattcaaaagagaaaagaaaaacgtgaaggtaatagagaaagtattcaacaaattgctcataaaattttagctaaaagattacaagaatttgctgatggtaaattatcttcacctaaaaagccaaaaagaagtgtaaacacctctacatccacaaaggcaacaagaattgaaaaaccaactaatgaattatattttgatgcttattatgatgatgaaaatggtattacaaataatggaaacaccgaatcatcaaccacaattaaatctaaaaaacctgaaaaggaaagtccaatgtttaaacaacaagatgaatatgatttaccagtactgaataatggtattaaaaaagattcttcagatactagacttatggcagataatgaatatgaaagattaacaagtgatattaaggatggattagatgaaattgatttagataatattaatccacaatctaaagaatttacaaatttaccattatcaactcagtatattgttctttcacatttaagacttagatcaagattaagaatgggttatactaaaactcaattacaaaaattattccctgatccaatggaatttagtaaatttcaaattaaaatggttcaaaagagaaattattttactcaaaaaattatgaatgttacaggtatggatggtgatattaatgatgatataatatctagaagaattgcaagtgataaaaatcgtgcatataatttaaaacgtattggtgatggttatgcattatctatttcaaaacaagaaattgatggtaattcttataagaaacctgtttttttagaggataatattgaaaaacctaaaattgaagaaatttcagatcatttttatagtgataattcagaaaatgatgatattgattgggatgatgtagaagttgtatcagagagtgttaaaactgattttaagaaaccagagaggaaagagaaaaagaaagagaaagtggaaaaagtggaaaaagtggaaaaagtagaaaatccattgttcctccaagatagtgatgaatcagaaaactcggaaaatgatgatgatgatgatgatgaaaatattgaaatggaagatgtaactgttgcacctgttttaaataatacagaagatggtgaagatgaaataatgaaacaaattcagtatttatacgattactctaataaacataacaagaaaaaatcaaatgaaacagacactgtacctgaaacagaggaaaaagaatttacagtcatctctgatgatgatgatatggatgaatatcatgaaatacaaatcaaacaaattgaagaagaagaattaagacttgcagttgaaagatctaaaaatgattatttaaattctttggatgaagaaaaaaatggtaaaactgaaaataataaattaaatgatgaagttccaattattttaagtacttcaagtttagcaaaaactttaaaactacctaatttttcaatgaaaaataatttactttttggtggatcatcaaatgtgaagaaacctgaacctaaaaggcaaattcaaccagttgttgaaatatctgatgttgaagatcttgatgatggtaatattaatcatttaaagaatcttaataatgaagataacaaagatatcgaaggaaaagacaaagaggaagggaaagaggaagaaaagaaaaaacctcttccattacctgaatggttcaccaatgcaagtgattttaaagaatcagatgttaaagaaaaatctgaaaataaagtacaaaaccagactaatgatgaaaaggctggtttaatatcatatggtgatgttgaaaattatttctctagtgatgatgataatgatattgattttattgaagtgacaaactcaaagaatgaaattgttgatctagaatctgaagatggaaatggaattaataatggtgaagtgattgacctagatgatgtagatgaagagaaaaaagttgtggatactgatgatcaatttgaaactgaaaatgaaaataagggtcctaagggacgtggagaagatacattgccacaacatgtagatgtgggaaagtccgctgatgagccattaaaggcttataatgtgggcactgtgagaaacgatgaggcagaaaattcagatagaagccacagtattgaaaccacaaaaccacagaatttaatgaatgtgttaagtggtaataaatctgtgaatgatattgatgaaaatgatgatagtggagatgatgatttctcagatgaggacgaagttaatttattattagatatggctgatgaaggatcatcatataataattttattgataatttacaaaataatggaactaattcaaatgccaagacatcaacatggaatattgatgatgaagctaaatttcaggaacaattaaagaaacaaaaacgtgattctgatgaagtttcaactaaaatgatttatgatattcaagatttattatcaagatttggtataccattcatcactgcaccaatggaagctgaagcacaatgtgcagaacttaaacttctaggattagttgatggtataattacagatgattctgattgtttcctatttggtggtgatagaatttataaaaatttatttaatgataaacacacagttgaatgttatcaaaatgatgatataatttatgaattaggtattaatagaaataatatgattgaacttgcaattttattaggtagtgattatactgaaggtattaaaggtgttggtaaagttactgcaatggaaattttaggagaatttaaaacattggagaaatttaaagaatggtgggttgattatcaacatggtattattgatactagtacagatacaccaattagaaagaaaattagaaagaaattaagtaagaaattatttattggtaatgatttcccaaataaattaatttatgaagcatatacacatccagaagttgatcatgataaaactcaatttaaatggggtcaaccaaatattgaaaaattacgtacttatttaaaatataatattggatggaatgaagagaaagtaaatgatattctttcacctgttattaaaaatatgggtaaaccacagacaagtattgaagaatttttttcagttgaatcagtacagagacgtcgtaaattagatttaagtaaaggtattcttgatgcaactgagaaattaaaagaatatcaaactaagaaacgaagtggtgatgatggtgatgggaatgatgaatcatcaactaataagagactgaaagtgtaaaataggacaattttattgtagactgtatacaatgtagatatttatagttaatacccgtatttccaaatatctttagcataattttcagtgagttctttatcttcaccatatagtgattgccaattactaaatccacctcttaaaatgaaaatattcatattttgaataaattcaatttcatcattatcatttgaattgtccaatttttcatttaaatatctcataaacttcattgcactacttggacctctctgttgacttaacatacaatgaaatataacagtattttgattcattgtttgtaaattatttaataatgatgacattgttgaattatctttaaattttgttgattcaatatgtttacaattaattatatgaccaccaatataatcattatctctaacatcaattacttgaaatttattacccatattggtatgaccttgtactatccatgatttcaatgtttgaggttcaatgaatttgacatctgatactgtaaatatttgacgtgacatgatggatatagaaagaaaggaaaatcaagaaaaacgtaaaataattctttgtagtttagtttagtttatataaataatttttaaaaatacaaggttacatgaacagaggtaacgaagatacagtataaaaatagatgtatagaaatacacatagaaatggaaatggaaatggaaatggaaataatcattaaatttaatcttgtaaagttttctttgaaactttctttggagttttctttgcagaacctaagatagcctttggttttgacttctttggagttttaacttgtttaacatcattggatgaacttggtaatgcttttctaggtgttgatgttctacttgataattttttaacatttttagacgttatctcagatgatgaattatcaccttcatcagttgaatcaacttcagattgtaatccaacccaatccataaaatttcccaaaatacttttcttattattattcttattattattaagagatttacttaatccattagcattatatttaagagcaaatttatcagcaggtgatttaccattagttattgaattattaaaattattatttattaaagattctctaactaaaatgtataaatctttcgttaaatgacttaaattatcattagtttgtttccaagaatttttaaaatcagttatattttttttcagttctaattcatttttctttaaccaagaaacatttaattcttgtcttgttgcacctcttgcaaaatttctcattaaatatttatcataatctctaataattttagtaattatatcacttgttgaaataccttcagttctttgagttgctaaaaacatacctgcctttttcattggtaaataaatatcatcaataccatctgcaacatatggtaaatcatcatgagcacaataatcaattttattatcttttaaaaatttcatacttaaaatccatggagcatcttcaattacttcatcaacccatttacaatgtctaacagtttcatatctttgtttatcagttaatacggttaaacctttccttttatgagtttctttatcatttggaataccaacaactaattcaacattgttgaaagctttcttacattgttctaattgtctcatatgacctaaatgaaataaatcgaaaacaccatctgcataaattctaattggtctatcctcaggtggtggattcattttaaaacctttaggtctccatttcctatattcaggttttaataattcatcaaattctttctccttatttaaaaattcaactttcttcttctctatttcagcttcctcttcctttgacattaattttttcttctttgatacatgaccatcttcaacaattacattgattctctcaggttcatcaccttcttcctccttaacaggtacaacgggcacagatgaacttctttcattattgttatcactataatcatccccatcattatctcttgatcttttccccttccttgcaaatccaaacaaagtttcactcaaagttctagtcaatgatcttggacgcaattgaccttgaccttgatcttggacattatcattatccccactctcagacatatcaactactatacttgctaaatatataacaaatcagatgattcaacagagaaatttgcagtgttcaaagtggaagagttgttcccaaattgaaaatagcgctatgtaatattttcaccacatgtttcttaaccagtctttctacaggtggctcttatggtttcctttcatttgatcaagggattagggacacaatggatctgcaaatagctcggaatttaggtcagatgttggagtctgcttcaaggtctctgaatattccatttgatgcctctagtgtaactgtttcattaccttcatcagttacttcatttattaatactaaatattataatattgaaacttcattatcaaagaaagatataataaaaggattggagagtaatagtgatgcagaaatatatactgccttaaagcatctagttgggaaattagcattggttgatgaatctacaatatcagattcaatgattaatgatcaagattatgattatgattataatgattataatgataatagtattgtaaaggaaattgttcaattattcccacatattgttaaaaatgttaattcaacaaatttaaagattaaaagattagtttatatattacttttaagatttaatcatttacaacaagatatttcattattatcaattaatgcaattcaaaaatctttaattgataaaaattcatttaatagatcattagcaattagatgtttaagtggtattcaaataccagctattttacctatattactactttcattaactaaattagttaaagattcttcaccattagtgagaagtgcttgttcaattgcaattattaaatgtgttcaattagatattcaatataatatgaaaagtaataatagaaatacaactatatctgatagaagatcatatttaattgaaaatatcaatattgaaggttcaaatattcaacaattataccttttattagatatacttttaagtgataatgattcaaaagttttaagtttagcaattattgcattttatgaaattttcaatggttgtttcgatatttggcataataaaattaataatttaattaatcattttgatgaattagattcttttgcaattgttaattttttagatataatggttgaatatattaaattattttatccaaagataacagaatcaactataccaattgaaattaatcaattatatgaaaaaattattgatcaaattgaatttgaaatgaattgtaatgttattttaagtatggttaaatttttaattattttattcccatttaaacttcaaagtaataaattattaaataaagttatgattaaattaattcaaaatgattataatgattcaattgataataatggtaaaatatttatttcattaaatatgattgaatatttaatatctaaagatatgataaaatttaatgattatcaaattaataattttataccattaagtaatgaaattgaaaatttacaaatatttgaattaaagattaatatattatttaaattaattaataataataattttaataaaattttcaaagaatttaaatttataattgaaaaatcacaattcccaataatttataaatttaaagttttacaaaaaattaataaattaattttattaaatattttaacaattgaacaattttctcaaataattagatttttcatgaataaattaacaattgaaaaaaataatttattagttggtgaatatattacaggtttaagacaattaattcaatcaaatttaatttattatattgatatattaattaaactatcaggtaaattatttaattcatatatgaataatgatataatacttgttaataatgcgaaaagttcaattatttggttattaggggagttttcaattaattatgatataaataataatacaaataatgataatgaaaaatgtcaaatattaaagaaaatgttaccaaatattgcaattaaattaattgaaaattataaatttgaaaatgattataatgttagatatgaaattttaatttttatgacaaaattaatgataattaatataattaataataataaggataattatcaattaattaataatgaaattttccaaattttcaattatttattattattaagtaaatttgataataatttaactattagggatataagtagattaattggatcaatattaccaaatgttatttattttacagatttaaatattaaagagaatttaaatattgatgaattattattaaatgattcaacattattaaaacattgtcaagataaatgtttaaatataaatattgcattattaatgtttcaaataaataaacctcaattaagtattaataatcaattaaataatttagaaatttacaataatattgatcaaagtttattgaattatttgaaaagtgtgaataatgaattagatatgggttatttaaattattataatgatttaagatcaaatgaatttaaattaattgattataataaatttcaatcaagtttttcatcaatgtcaattaataataataatgaaacacagaaggttaataaaccaatacatgaggtgactaggaaacaggaaaatgttgtcaaatatagattacaatcattagatgatttccttggttcatagtgtgtatagattttgtatagcttgatgatccaccacgacatggaatttgtgatgtttgtaaaattatttgtctttccatcgtataatatcaattctttgataagtaaatgtttgttatatataaccagtgttgttataagatgtgttatttagtataatattggctaaaactatcaattttgtgaattattacctttctttaaataaaagtatcaatctgtaattaataaaacagtttagttattaaaatatttaaatttcaacatttttcaaacactactaaattataccaataaacactccatctctttacaattcaattcatctatacatcaccatatatctaactctattacacttacaatacctaaaccaataaatacattaaatacactaaatacatcacacaaaattacgtaatcatgtataattcccccattaaattgaaatttttcactaagaatatgaacatctttaactatatactatactctctttagaccaaaagcaatgtcatttttaggttttggaggtaataaatcaacagaaactacacctgtattagatccaacacaacaagaattagttaataagattaaaaatgaaattcaacaagaattagcaacaggttatgcaacttcattagttaatgcattaactgaaaattgttttaataaatgtattaaaattccaaaacatccattaaataatgatgaagagagatgtattgaagattgtagtggtaaatttatgagaagttggaatataattagtcaaagttatatatcacgtataaatcaaaaagatttgtaagtaaaaagtctaaaatgtgtaatgaaaaaaaaaaatttccgtatcttgtataaagttctttctttatagaccaatgatgataataagacgttgttatagtaataatattagaacacatattagaagaacaattaaaccacctaaaccaccaatttcacgtaatttaaaatcaattttaaaaactaagacaattgatattagaagtgaaattgataaatttattgatgaaaatgccaatattgaaaaacaatggttgaaaatattaaatagtaaagagaaaattaataaagatcaaataattgaagaattattaaagaaaattattaatagtagtgaaagagagaaagatgaagagttgagtgggggtattaatgaagctttaattaatcaagttattaaatatgatacaatgtatggaccaaagggtgaaggtaaagataattatcctaatgagataagagatgggataatggagtgtagagagggtgaagatttgattaatatggttaaaatatatgatatttattttacattattaaagaaaagttttattattaagaatattgaaaggagggaagaagttattagaaatattgggattaatggagattatgataatggattagagaaggcaattgaagataagaggtatgaagaagttgaagaattatggtataagattgaaaaaccaagaaatttaaatatttattatagtagttataataaattgatgaagttaataaagaaggaaggtaataagatgaatggtaaatttattgatgaatttttaaaagatttaattatatcagatattggattagaatatgatgaaattgatattatgattaataatattattagatttcaaaaatttaataaagaagtttatgaagagattaagaaggagttagaggatgaatttaatttaaagattagtttagataattatttaaattttttcaatggagcattaatgaataatgaatttaaattatgtgaaaagattattgaagatatttataatgaaggatatttattagataggaaattaattcaaatgatgattgaatattatggtaaaattggtgatgagggtagggttttcaagatggtggagtatatgattaaagttaataaaatgaagatgtttagtaaagattgggaattgttaattaataatttaatgaaaattgggtatagaagtgtaagtattgatattataaagggattaattataattcaagatggatttgaaggagggtatgaaggtaatgatattgatattgaatatgataataagataagagatttagagattttcaatacgagtaccaaatcatttgaaaatgatattataataatcaagccaaagattacaattgatatgattaataatatacttataagtagtgaaaatgttaaagaatatgagagattaattgatattatagataatgaacataataaagaattaattaatagtggagaaatttttaaaattgaattaatggttaaacatggatttgaagtgtttacaagtagggaaatatttagagaatgtgttattggagggttaaataggatgaaaattgaagaagttgataaatttgtcagtgatgatgagagtataagggttattacgagtatatgtggagaatggattgaaagtgaagatgaaggtgaagatgaagtggttatggcatatggtaagttactcagtggtgtaagtgataacagagagagattacataatgtgttaattgtggccggtatttccgtgtagaatagtatggaatgagtcaatgtgggatattcactgtggtggtgataaaattagtaagtgagtaatatttttatttttatttttgttgagatgactctgaaaaatttattttattattttattttaactgtggcggagagatctgattatggtatttaactatttaactatttgggtttccagtattttgtgtattatttatcctttacttctcttctcttcttttagtaacccagtcttatcatgtcttccactgcttctcaagatttctttgtgcaaactcacatgtgtgcctcaactcctaataactataactataataatataattaattacagtactataatatcatctagcaacgatgataataataatgagcaattaataaatgaaactacaacagactccgatgaattatttgaaattgatgatgttgaaacatgtacttattccaacacaacaccaatttcccaaatttcccattccctcccttcacttatgatggatttatcctctgatgatgatgaagattttgaattagatttcgatgaattagaatcaattgatagaattccaataatggattcagctacaaatacatggtcaaataatttattttcaccaaatttacgtcctactttaccatcaaagaataataataataataataataataataataatagaaatttatcatttgattcattattaaataataaaaaaagtagtatcatcactaaacaaagagttcattcagttactgaagataattataatatatggttatcaaatatataacacattgtacctaaactttatgactacttctttgctttactaatgatatacccaattactgttactatttatttattactatctatatactctatataaatattaaaaaaaaaaaacaatcttatacttatactatactctatattattaactccgataaagtaagtaacctaccccacggacacgtgttttataataattatttttatgagatgactattagtattttttctttcgcttttgcctatttaggaaatattctataaaatttttatttaaccgcgttttttcactttgtttcatcttcatctttaaacactctataaatacctttccatggtataacataaactaatgtaccaatcatacaccatgttgttataattataactgtaaatccataaattgtacttaaaatttgaaatcctcttatatttgtaattttataaatttctaaactacttaaactaatagttccaaatgggaatgttgctgcccacattgttggtgtccaatatcttactttattatgttttttcttatgataactatttggccatccaatataccaatatccaattgttaaaatcccccaaatagttaataatataccaaatgataaaaataatatcgaaattcctaatccttgtattttaattattttatcaattattatcaattgtgtttcattattaacaatatttgttaattttaaatatcttattaaattaatactattaagtaatatagaaaatcctccctgtcccattataccaattggaacaaacattgtaaatgaattattaaattttggtaatccaaatgttaaaatctttgtgaaaattattggtatgaaaacaattgatgatgtaattgcaactccaaataacataaatgtaacaattatcatcgataataaatacttttcatcatcaataattgaactaattaatgcaccacttgcacttgtaactgttgttgttactaatggtaataaatatgctggtgttactttacttaaaaattcatttttctctcttaatttattatgttcaaaaaatccttcctctaaatgttttttttgataaatatttgttggataactcaataaaaaaaatgtaatgaaaaaaatacaacaaattgcctggaaaaaattaatccaccataatgtgaaaattgcagttttccaatttggtttaaggaaaaataacatattaatcattgttgtaaatgacattgatgatgcaccaaaataaattgttaaatgtggttcatgtaatatcttccaaattttttccattttattatatttacaaataaataatgaatgatttataaccaatataactaaattaatgaaaaaatatattataccaacaaatttcatacctttttcaattgatttaatggggaaattatacattatacctgatgttataccaactcccatacttgcaataaaatgtaatggatgatatgattcaattattaaattaattgatttatgaagtttattcatgatggtttgtgtatagagaagataatattacctattcaaagataattatttgatgataagagccacagttattaatgtagtgaaaaaatttttattctttaatgtaaacatgtaaacatgtcaataatgtattaaaatattttattatcaacttcaagaatgactctaagtattgatctactattgtaataacaaactccgatattctatataatagatttcatcaatttccgtattgtaagattatatatacggactttgcaaaataaagtttattacagctatatgttaaatgaataaatgaataattacgtaatagaaacaatagcacgtgactctgcgactatgagtcgatgggtattcaaaatatttatacgaaaattatacgatcgtatacgagtcgtttgatttttctattaattttcaattttcattttttttcgtgttgtacgttccacaaaggctcatttggctcatcttgatttcttttagtttgagtttgtttctttttctttttcttttggcaatcaccctcttatcccacaatgacagttcaaaatgttggtattaaagcaatagaattttatattcctggtcaatatgttaatcaagcagaattagaaaaattcgataatgtctcacaaggtaaatatacaattggtttaggtcaaacaaatatggcattcgttaatgatagagaagatatttattcaatgtctttaacagttttgaaaaaccttattgataattataatattgatattaataatattggtagattagaagttggtactgaaactttattagataaatctaaatctgttaaatctgttctaatgcaattatttaaagataatactgatattgaaggtattgataatattaatgcttgttatggtggtactgcagctgttataaatgcaattaattgggctcaatctgattcttgggatggtagagatgcaattgttgtttgtggtgatattgcaatttatgaaaaaggttctgcaagaccaactggtggtgcaggtactgttgctattttaattggtccaaatgctccaattgttttcgatccaattagaggttcttatatggaacatgcttatgatttttataaaccaaattttacaagtgaatatccagttgttgatggtcatttttcattatcttgttatgttaaagcagttgattattgttataaatcttattctaaaaaggcaatttcaaaaggtttaagtaaatctgaaaataatactgttggtattgattttttcgattataatgctttccatgtaccaacttgtaaattagttgcaaaatcttatgcaagattattatataatgattatattaataatccaaatattttacctgaattagattcaagtaaatttattaatttagattatgaaactacattaattgataaaactgttgaaaaaacttttatgccattatcaaaggaaaaatttaataaaaatgttaaaccttcattagaattaccaactaatgttggtaatatgtatacaggttctgtttggggttcattatgttcattattatcaattgttggtaatgatgaattacaaaataaaagaattggtttattctcttatggttcaggtttagctgcaactatgttatcagttaaagttaatggtgatatttcaaatattacatcaaaattaaatgttaaagaacgtttaattaatagagaattgaaaactccaaaagaatatgaagatgcaattgctttaagagagaaagctcatttacaaaaatcttttaaaccatcaggttcaattgattatattccaaatggttcattctatttaactgaaattgatgataaatttagaagattttatgaaattaaaaattaattaaaatcttctttacattgctaagctattatattatataaacaaatctatactttgctgtttgttgtttttgtttttttcttactctttcttatatataattctttattaaattaaattaataatatttttttttttttttttaattagaaaaacaaccttatacaaacttatacttaagaaactacgaaaataattgcaccaataatcatcattgatgcacttgtccaccaccataatgaataattaatactatctttcataactgcattagttttataactattctctaatgaacgtttaattctatcagataaacttaattcagatccatattgatttaaatctcttttcttaagtttagaaccaacattttcagttgcagcaggattcattgtacttgttggtaacatttgaggtggttgataagctaaatataatggttgcataatttctccattacttttatgtaaatctaatctccatttaccatgatatggatcaacataaacttgataagttttaaatttttcagtttgattatatcttgaatacattgaaattccactatcattacaaggttgtgataataattgtctaccatcaatttcaaatggtgttaaagttaatgaaccatcatcatttttaatccatgtaccatgttgaaaaattaaaattgctgttggacatgaatgatttttagcatttggtgaaacttgataaattgcttcttcccaaaatccatcctctgtgaaagaatatgaaattccaggtaatgcaggttcaattaataattcatcaattggatcgaaaaatgatggtcctgtgaaaacagtatttgcttttgatgaccatgtaccaacaattgaatcacttacaagatttggattaatcgggtcagcagatgctgaagaacttgctgaggagcttgatgaggagattgatgaagaacttgttgaggaagttgataaagtatcagtatcagtatcagtatcagcgattgtggttgatgatgagcttgatgtagttggtgtaacaggggtagctgtagttggagtagttactgtagttggagtaacaggggtagctgtagttggagtagttgctgtagttggagtagttgctgtagttggagtagttgctgtaacaggcgtagcagttgtaacatctgttggtgttgcaatagtatttgtatcaatagtatcagtatttgtatcagtatctataagggtattagtattagcagttgtaacagcattaacagcagctgctgttgtagttggaactgtagttaaaactgttgttggtgtagtatttattccttgagctgcatcagcggcagcaactgcagcatcagcaacatcatcagcgttaactatttgagtgagaacaaagagagaagtcaataaccaagcctttatttgcatctttacgttgttgccaagggaataaagaaaggaaagaagaaagaagaaagaacagtatagaaatgaaaatagaaacaagattataaatatagaaactcatgctataaaaatttaagccacgaaaaatttatcttagtaaaggaaaggtatatactgtattaccaggtctggatggcaaatatggggatggataaacatcagttgagtaaacaatacaccatttcaagggatattgtcgatgaggtaccttcatttgaaacagttggaaacattaatgatgataaaatcaataaaaacaccgaatttattcaaaatagattaaataaagataaagatagaggtagatcaagatcaattgaaatatcagtagtaagtaatgatagggataaaacacctccaagagcagataaagatcgtatacgaaagaataggaaacgtaaggcagaagttgatcaattcccaattattaatggtattgcattaactgatgaatttttagatagtatattacctgatggatttaaaattatatcaatacctaggagtactaacggtatgacaccacctgatatttcatcatttaatacaaaatctaatggaattttactaaataatgataataatgaaaacaatattaataataataataataataataatatagttgaaatacctaaattatcagatttaaaggatttacaatattttactgatttagattctaaaattttctataaattaacaatattgaaaaataattcagatattgaaaaattatcacaagatgaacaattagagattaaatgtatgaaacttatattaaaaattaaaaatggttcaaatttatcaaggaaacctgcaatgaaaaatttaactgaaaatgcaattaaatttggtcctaatataatttttaatataattttaccattattaagtgatgaacaattggatgaacaaagtagacatttattaattaaactaattgttaatataatgtttaaatttgattcatcattaattaaaccttttacaaataatattttaactgttacaatgcctttattaaatgatgaaaataaatttacaagatctgaaggtaatgaattaatttcaaaattatctaaaattgttggtttatatacaatgattaatattttgaaaaaagatttatcaaataatgatgaattaactagaaatttaatttctaaaacttttgcaattttagcaaatacttttggtattaaaaatttattaccatttttaaaaattgtttgtaattcaaggaaaaattatctaattagatttacaggtacaaaaattattcaacaaatttcaattttaatgaaacattcaattagaccttttattaatgaacttatattaattatttctaaaaatcttaatgatgaaattctaaatgttagaacaattacagcttcaactatatcttcattaattgaagcttgttatccatttggttatgaatctttccaaattataattaatccattatttaaaggtttaagaaatcatagaggtaaaccattatcatattttattaaagcttttggtaatttaataccattaattgataataatgatgatttgaatttttattcatttgaattatttaaaataattaaaagagaatcaaataataatcttaatgatgatgaaattaaaaaatcaattttaatttcaattgaaaaaatttgtaaattaaacaatttacagggaaatataattgaaaattcagatttatcaaatactttttttaaaaatttttggattagaagaactgcattagataaaaaaattgttaatttaacaattaatgcatgttattcattatcattgaaaattggttcattagagacaattattaaaattttaccatttttaaaggatgattcagaaccttttaggaaaatgacattagaggcatgtgataaagttttaacatcatttggtgcatttgatttagatgataaaactattaatagattaattgatggtttattatattgtttacaaaatcaaaatcaaattaatagtgaaaaaaataataaaatttcaaatttaattatattaaattcatttggtaatataatgaataatttaggtgttagatctaaaattcatttaaagaaaattattagttcaattttatttagattaaagaataaagatccagaaattagagaacaatcagctgatttaattgttcaaattgttgatgttttaaaaatttgtaatgaagataatcaattaattagattatgtacaatattatatgaatcattaggtgaagtttatcctgatgttttaggttcaattttaaatgcattaaggaaagttattaataaaattgataatattgaatcattgaatccttcaattggacaaattttatcaacattaacaccaattttaaagaatagaaatgaaaaagttcaagaaatgacaattccattaattggtgatattgcaattaggggtaaaaattttataaataataaagaatggttaagaatttcatttgaattattggaaatgttaaaagcatataggaaaaatattaggaaaagtgcaaataaaacatttggattaatttctaaaattattggaccatcagatttaattgttatgttattaaataatttaaaagttcaagaacgtcaattaagaatttcaacagctgttgcaattggtataattgcagaaaattgtaaaccatttacaattttaccaattttaatgaatgaatttagatatcctgataaaaatgttcaaaatggtgttttaaaggcattatcatttatgtttgaatatattggagaaatgggatcagattatatttatgcaataactccattattattagattcattaactgatagagatttagttcatagacaaattagtgcaaatgttatcaaaaatattgcattaggtagttattgtcaaggttatgaaaatgcatttattaatttccttaatttaatttggccaaatatttttgaaacttcacctcatgttattttacaaattatggaatcaattgaatgtttaaatattgtacttggttgtaatataattttaaaatatatttggtcaggtttatttcatccttcaaggaaagttagagaaacttattggaaaatttataataatatttatattgcaagttgttcatcaatggtaccatattatccatcatttaaacaattaggaccagttttaggaccaattgatgatacagttgattcaaatttaactgataactattcaattgaagagttagatctttgggtatgatgtaatcaaagaaggctgtgcatagcatgaactgaatgaattgttgtttcatgttgtttttgattctgtttcatgttgtttcatgtttcttttaaatgagcgtctattgtctgctggatggacgtagtatgatgataataacaatataataataacaataataataattaattagtaatttaatattatatgggaggctgtattttgtattgaattctaacttcatttcatttcattttatttctcttataatttgtatattctatattggtttggttgattgattagttgtttatttgttagttttatacatatttctctataattgaaatatattcttacattcattaactatcatatatattatataaatacattcgtttcttcaatttaattcataagcatataagaaaataataatgaatatagaaactgcattacagaagcaatttgaactatctaaaacacttaataataatgttaatattgcacaaaatgcatcacatcaattaacattacaattaaagaaaattaaacaagagaatcaagatgcaacattacaatcaatgtcaaataattgtcaaaagaatattttatcaaataatgaaacaaaatataaattaaataattataaaactttaaaaggtcattttgataaagtttcaagttgtgcatggtatcctgataatcaacatttagttacatcatcacaagatggttatttattagtttgggatgctgttaaaggtttaaaaaataatttagttgaattagatgatccttatataatgggatgtgatgttagttataatggacaattagttgcaactggtggtttagataatacttgtattgtttataaattaagtacaagtattgataatgatgataataataataataacaataataataacaataataatccaggtttattatcaattttacgagatcataaagaatatatttcagatttatcatttttacataaatcttcaacacaattaataacatcatcaggagataaaagttgtatattatgggatacatcaaaaggtggttatatacgtcatttttatggacatttaggtgatgttttatcattaagtattaataaaaatgatttaaataattcaaatccaaatttatttgtaacttcatcatcagataaattatcaatgttatgggatataagagatccattagcaagtagaaaatatttagttaattctaaatttgattcaagtgaaattgaatttttccctgatggtaattgttttacatgtggttgtgatgatggtacaattaaaatgtttgatatacgatgtgatggtgaattatcaacttatacaattgataaagttcgaaaatatattaattcaaataatttacaaaatacaataccaacatataataattacagtaacaataataatgatcaaaattcaacttttgatattaatcaagatcaaagatcaacatctgttagatcattaatgagtaatatgcaagcatcaattgataatcctggagttttatcattagatttttctaaaagtggtagattaatgtttacatcatatgcagaatctacaagtgttttcatttgggatacaataacgggtgaaattgttggttcattaaatggtcataatggaattgttagtaaagttaaagtatcatctgatggtttaggtattgcaactgcaagtagggatgaaacaattaaaatttggtctgtttgatgaagatattgtaaaatgtattaattatatatagtaaatagttagttaattatattatatataaaattttaaagtataaaagtatattattaaagtaaatgaatttgaaaaggagaaagtttaatcaactcttttcttaatataatcccataaacttttcaataaagtatcaggtaaggtaaacagatccatagtaaattcaccattatcaacatcatttttaatattcatttcaggtgttctattatcattaatcatttgtactacacctaataaatcatcttcctttaatttaactaaaagttcagccattttctctaaatcaacaccacctttatttgcagcattttttgatcttttaatattttttggttcatttgcatttgttgtaacactattatttttacgtttatcaccaatacttgatgtattaccatttaaattatctgtaccattattaataccagtattattatttaaattattattattattaatactactattattattgataccattattattttcatcatttaacattggtacaggaccagattttgctaattcttttaataaatttggtttcgtcgtattaattgaaatttgtttatcaataacatatttctctttataaaaattaaggtcatgatttaattttttatcaccacctttatcaattaatgttaaagtaattggaatatcaaatccaccccaaccttgttcttgaattgtaaatggaggtttcttaaatgaccttacaggatttgcaaatgttggatgtaatgaatatgtaactttatcaaatattgttgcaggtacttccaatcctttatcattaactaatgaaacttgaatactccattccctcattgggaaaccttcttgaacagctggaatatcctttaacacatgttgtgatgtagtaattctaacagttctcttaacttcaaccatagtagtggaacttgcactggtatattgtattgtattccaaaagcaaaagaagtgcctatagtaaccatacaaatctgtggtcgttgcgtactttaattttgcatctcctcagttaagttaacttttacagcttcattctctcctgtactgtatctgtatctatcttcatggaatctgctgtagttggatgattactggcctgtatgctgtctgtgtctcatacttacaggtagtattacacattcattaattacatttcaaaatacatttctaaataacttctacttttacttatacttctatttattatataacatatcctaagatacaacaaacaattgctacaatgaatcctgtaactttaacacggttaccatcattagataattcataatctgctgctggaagatcagtatatggactaaaattctctaaaagttgttccaatcctgtcatattattaccattagtatttgttccattaccattactactaccattattattataaagtgttttagtataataactttgtgatgttgaataattaactgctgtacttgatggtgttgttgatgttgtgataacattagaaaatggatcaaatatattattagaatttgtaattgttaaatcattaattggggttgttgtatctgaaataattacatttgttgaagatggtattgaaactgatgatttaattggtgatggtacaattgatgttgaaagtattgttggtttaaaagatttagaagtttcaaagaaattcttacgatcacctaaaatcatatcaagttcacctgctcccggtataacttctaaaattgatgatgatgttacaattggaattgaaattgagattgatgtagatgatatagttgtattacttattggtaatgataatgaaggaggtgttaaaatattagttgctttaacatattcagttgttaatgaagttgtaatatcagttttagtttcaataataataacagaactaataatttcttcaattgatgttgaattagaaattggtactgatgttggaactacaaattctttcttagtttcagtaattacaattgtattagttggtacaacagtttcagtaattgtaacaaaaattgttgttggatttaatgtaacataaactgttttctcctctgtaatatattgaaagttttcataaactgggaaatcatcttgaatatttaaaatattttcactactattaagactatcatgtggaattgcagcttgttgttcctcaattataataggatttgataaaactaattgaatttcacaaatacttaaaattgttacaattttactaattattttacaaaacttcatcctattaaatacaatatgttcaatctatctagcaactacgtacgttcttctctgataaacaaaacaaaacaaaagaaaagaaaacaaaacgaaacaaaacaaaacaaaaagaaacaaacaaacaaaacatacaaacaaatatgctaatataattacaaaaagggcattttagtatcccctaatataataaaattagttattaacaaagctatacatctatctattttttaatcaaaatattacaaattgtattctgtccaggcatctaaataaacatcaagtaaacatgatgcactccatgcctgtgttggacttgaatcttgacaaataattccatctttattagttaattcagttaatcctgcccattcactttcatgaatccatttcttatgttcaattaatctaacccaaattaattgttgtaaatatgaacttggtgtacatctatcaatattacatctatcaatttcactaaaatgtaatttagcatatgctctaaggaaatatccataaatccaaacccattcaggtccttgatgataatttctaccctttgatgttgcaaaatcttcattatcaattccattatgataatatggtttatattctaaatctcctggatctaatgtacgtaaaccaactggacctcttaatatcttatcagtcatttgaatcgcatgtaatgcatgttcttgaacaaataattctggtgctgcattatatgcaattgggaaattacctcttaattgataatcttcatattctttacttgatttatagacatctttataaattcctcttctatgaacaatacttgaattaatttcatatttggaatcatcatctgaattaattggtatataaaaacatttctcaaaattctccattaacaaattatcccattccttaaatgtaatcttatcaccattttgattaataactgaatcatatttaaataatcctttctcatttaattcaataacaaatcttaaacaacttttcagtaatccaataatttcaattggtgcaccatcccttggtgtacctgggtatcccttattacctgccttagttgattctcccatcttatccatccatgtaccacaattccattgattacctccaaataaaatacctgtttcccaatcaactttaatttcaatattaaatccttcatctctcatttgtgaatcaatcttttcacctgcatttgcctctctaaatttaataccttttgcatgcctacttaaaatttcataaattatatcttcaattgaactttcaactttaaatgctctttcatcatcaaatgggaaatatgtatcatctaatgaaaatcttcttttaactttttcttttaaaatatttgatccattaggtactaatgtaatataatcttgaataaattgtaaataaaaccaaactgcatcccttgcattatatcttggttccttacctgatcctaataaatttggtattaatccatgttttaatgttttaccaaaacataatatatgatcttttgcagtatcatatctaccagttgataataataatcctctacttgaaatgaatacatctctaccccaacatctcataaaatcgtaactaaaatgtggtaatccagctgccattgatgggattttcttaaatggatgaattgatgcattattcattttaccaatcatttgaattgaaaccattgctaatgtttgaatgaaaacagttgaattttgaattgatttagtcattttacttaatgcagtaaatcttaatgcttcatatgcaacaccaataattaatgcaaaatatcttggaagaaggaaatttggtatatctttaatcttattaaatcttgtttcaagccaaattctgaaaactttaattgaattatcatcattttcataaggaattaatctatttgtaacataatctaatgcccatttaccatttctaagatgatctgataatggatgtgataaatcatttttatcaattatatctcttaaaactgatatccaaccttgaatacctgcataaaccaatgatccatgattaggtattgtataaacaccagatttaccattagttgcatctctttcctcagattcacatctatataaaatacaatttaaatcaactaatgataaatcctttgcagcttcaattgcaccagttctaacaaattcatctaattcttcatcacatccaataatttgtgtttgaacaactgcaattgaaccttgaggaaaataatctggtattgaaatagttgttgatctttcatcactatcaaaattacaattaattggatctaaagttttcaattccgtttccattggatgaataaatccatcatcaatattatcattattattattatcgtcatttgatttattgattaatgcataagaaaattgatgttttgccttaacaccatgtaaaacaattggttttaaactttgatcaccatcttgataaaatttagtacgtgcaattaataaataacctaaacctgtttgtgcattaattctatgaattgttataaattcattttcatgatgaacatacatttcattacgttcaatatcttcaatactttgattagcaatttcatgtctaatatcacttaatgattttttaacttttgaaatacctaaatttaatccataaatatatttatttttttcagtaacaacatttaataaatttggataacattcatcaaatcccattgttgtaccatttgcacatgaacaaaatgaaactaatgcagcagttggtaaagtatcttcaattgttctcttttgatttggagtttcattatcatgagtacaatccataaataatgcatgaggttcctgtgatgtaactaattgaggaattggaatttcagatttacatttcatatcttctgaacatcttttttcaaattctaatggatgagcaggatatgcaattaaatctaatggtaaccatctaaatgaaccaattggtctacctccatgtttatgacataatcttgataattcactaacagaatttgcttgcattgcttctctaattaatgatgaaatacctaatttttcaacatataaaatatctaattcttcagaaccactaaacaattctgcaacaacatataaatttggattaactgatcttgcagcatctaacattgcaacaccaacatgaattggagttgaatgacaattatcaattctaaaaccatgaaataattttgccattaatttagtatattcaaacattctatcccaaagataaggtgaatcattataatttgaaccataacgtaatttaacacaatcaccccaaacaataacttctctacgaagataagattttgattgatttgatgcaaaatcaaccaaaggatttgcaccccaaatccaaccattattagctaaagcccaattttcaccattagaatctttaaatcttgtaaaataaggttcagttaatggactataaggattaatttcacctaattttggaccatttgaatccaatctaagataattaattctattaaataattgagttataattgaatcattatcaatattataagtacgatataatgataaattaatttcatctaaaattttttgagcattataataaattatatcattaaaatttgaatttaaaccataaatatttgccaaaatatttgcaaattttaaaatatttaaactatttgaaaatctatcatctaagatattaaaatcttttaatttacaattatcaattataaaatttgataattttggtaaattattaataatttcataaggtatatcaattttagtaaaacatttttcaattttattatgccaaacatcatttaatttagataaatgattattaatatcaacaatataaaattcccataattttaattcacccaagacatgaattttaataccatcaataattttatttaaatcatcaatattattaattatagttggataatctaattctttcatattacaactaaattttaataataaagcatctaattccattgcagaaattaaatgaggagcagttttttgattataaccaacatcgggatgatcaataatccattgtgaattattagctgtatgattatatacaatatcagtcattgataaaataccatatttttcttctaataaattagtcataaatttaatatctgattcaccatttgagaagatttcatcatcaaattgtaattgatcgaaaattgaataaggagaatttgattcaccacgtttttgtaatggagtaaaatgaatcatattataacctttatttttaatattttcgaaaagtggtaaccaattttcattaaaatcattaccaacccattttgaaataactgattgcattgtaattgaattaaaggttaaatatttattattaatgaaaagtgaaggaggtacaacaaaatgatattccaatgatttaacacaaatttcatttgaattaattccattaatttcattattattattattattatcatcaaatatattaattaaactattataagtaatataataagaataagaacctggtttataaatatcgatatcaaccattacatctttataaacagaactttcgatatcaattgaatggaatttatctctttgaaatttatcattataatttttaacaacatttgtccaaattttaccattattacaaatttttgaacctgaaactatataaaatcttaaagtaaataatggttgattattattattattattattattattatcattaatattttgatcaggtggacaagcggggaaagttaaaacaccaccggaaatattagaaatcaatggtttaccagtatcatctaaacgtaaaagtacaattttagtcattttaatgaagtgggcaaaaattgattattgacggataatttaaaatgtgggaaaaatatggggtaaatgtatagtaattgaagtgattggataattttagataaataaaaagtgaatgattatgagttgtatatgtgtataactacaattatagtgtggaatgaatgtaattgagtttagtaaatgaagaaatagaagaaacaactgataaagaaggaataatttaataaaagtgtaatcaggacatgctcatcaaaaaaaggaaaaactctattgtttaatatatggagttaatggattattattacaatagttgctacaatggtgtaatgagtggcttggttttaatagttattatctttatattctgtattgtattgtattgtatgatagtattagtatagtaaagtgatagtattatctatcctttacagtactttactgtagtatctaattaataatgatagtgattacgtaagtatagtatagagtatatcatattgataataagataataagataataagataatataatagattaaaattgatatataatgactatacattatacaaagcgtagcaaaaaagtaatgttctaaatagtaatatgattaagattaaaattaaaatttcattgtcttattcttcttctttgaagcaactttctttttataatttgaagctctagaatttctccaaccatgagttttaactttaactaattcttcaactggaatatctaatggattagtagtagtacttgtactattactttcatcttgatctttattttctttatttaattgttcttgctttaataaattttccttttgcttttcagctaatcttaaagttctctcttgagcagctttaaaataatctgaatttggattaaaacatttagctttctttgtaacttttttggatttagatcttaatgaatgtgccattgtgataagttgtgtggattactcaaatgtaaatgaaactaatgaagtatcttaatcttaaataaagtgaaaaaaaattttttttcctaaataaataatattactaaaaaaaattcttatgataaccctgtcacgtgcagcacacgtgctattaaaaagggctacacgcggtgcgcagggtgttgcttattacgtaatataggaaaggaaatgaaaaaaaaataaagaaacaatttactaataaacagtcacaataaattaagaaaaaaaaaagtgagaaattttccccatcactatcccccaccaatccctctgtacgctcccccactgccacagtaattttcctccattaaaatattttcctccacccttgggtcttactatcaaattatctcaatattataatattactgattttattgatttttattctatattatagttttaattttataattattacctatttttacttactttctagcacaacaagtattcaaagatgtacgtataatactataactatcgtcatatcatataatatcaatcatatcatacactctacaagttgaaaattccaaattacccacttatttacttatttaaaaaattagttgaaaaaaaaatcatagagagaaattttttctaattattaattaataatcactttagataatacatttttctattaaaactattcaaataatatactacaatgtatgtattgtgatataatgatataatgatatgacaaataattctatattagaatacaaaatactaacatactttatttatctattacagggctaacctccgtttacaaaaaagacttgctgcatcagttttaggttgtggtgaaagaaaaatctggttagatccagctgagacaactgaacttgctcaagcaaattcaagagcttcaattagaaaattatacaagaatggttcaattgttaaaaaaccaacaactgttcattcaagatctcatgcaagagctttagctgaatcaaagagaggtggtagacatatgggttatggtaaaagaaaaggtaccgctaatgcaagaatgtcaactcaagttttatggatgagaagattaagagttttaagaagattgttagctaaatatagagcagctggtaaaattgatagacatttataccatgctttatataaatctgctaagggtaatagttttaaacataaaagagctttagttgaacatgttattcaagcaaaggctgaagctttaagagaaaaagcattaaaggaagaagctgaagcaagaagaattagaaataaggctgcaagagaaagaagagctgcaagattagctgaaaagagagatgctttacttaaccaagaataaattaactatacttaatttaatttaattaattaacttcttatatattttatatttaagtatctatttttactacatgtaatttcttttcattatcataaataatattttaatctctaaaattaatctaattaattaattatccatccctccctcactactttctttttacaaatgagtgtatattcagtaagagacaacaatattagtgatgaaagttcaaatattgatttagaggcattagatagtgatgatttaatttcaaataatttatcaataaatgattcaataaattcatcatattcaaatccattcaatacaacaataaccgctgaccaagctattaataataacaataatataactaaccctccaataattcatataaatacatatcaaagttcaaatttacaatcaattaagagacgtacaactacaaatgattcaaatattaatgataattattcaattaatgatataaatgcattagatgataataatgattattattcagatgatgaaacatctacagatgatgatgatgattataatcaagatcttgtaagtaatgtaggtattgatgatgataatgaaagttataaaaatcttaataataaacaatttaataataaaattggtgataaattgaaaaccacatggcaaaattgtaaaaatgatgaaattgaatataaggaatcacaaataattgatgaagtttccaaattacaaaatttaaattttttttcaaataaatatattgaaaatttagaaaatttgaaaatttcacaattaggtttattaattgaaatggttaaattaactgataattcatttgatgaattttataatatttggaataattttaatgaaaaatttattaatgatgatagtaaaggtaatgataattcagaaaaggttgataatgatataaattctaaaaattctaaaaattctaaaaattctacaaaggaaagtaaagaaaatgatgataaagatgaagataataaagaaagcaatgaaacaaataataattctaatattgaagattatattgataataataatgatgatgattatcaaaaggaaatggaaatggtaacttggtttaatattaatgaaagtgaaggttttaaattaatggaacaacgtaaattagaaattcttaatgatttagataaaataaataattcaattgaattaattgatttatcaacaaaatcaatttggtcaaaatattgaatttattcatgtactttatcgttatttacattttatacccatatcttttcttaccaagtaaataactatcctcttcattatttatattaatattatcttcactatcaagtaatttatcatcaatttggaaatatttagttattggtgatacatcctttaaatgatttgtactataattattatttataagtgttatattagttggtaatatttcattattagttataatatcattattattatttattatttcagcatcattgatgttattattaatatgatcattattaataaaatttattattggcattgaataatttctatcattataataataattattataatatgaattaccattataataattatttaaatattgattattcgaactatattgatcaataggtactgaacttctctttgtagttggaggtgttataatattttcatatgatattcgatcatttaatgaaaataaactattactcttattcatactatcatccattatattttcatttttatcttcatctttttctttatctttatcaattattgaattaattttcgtaaatgttgtaattgcttgtgattgattatcaactttattaaatctccaaataattatacatctaacatcatttaaatttaaattatcaatattaatattactaccatcattataattattttcaccacaatatattataaattgttgaatttttaaaggttgaatctctaattcaaatgatttttcttgaagtttaattaattgaggatcattaccattataaatcatttccctcctctttgttgaaagataatttttccaataatttgtaccaattttagaatttgtaattaattcattctttttatttttactaattgtagaatttaaaatttcgaaattttcttgaattaaaactttctttgatgttataattgtcaatataccatatttattatcctctttcattaattcattaaaacttaatttaattgaaaaattataataaccatttaataaatttttcgttattggtggtaaaaacattgaagattttgcatgaattattggaatctttaaattatttaaattatctagaccatttttctctttatttaataatttataagtttcaggatatttagcattcaataaatctttatcaattgaaatttcatttatttcatcaaataataaacttggtggtgagaatgttgaaaacatatgagaatcatcaattaatttaaaatttatataaaccatttcaaatttcttaatattgaccctaattggtggttgattagtattcataatgacattatcattattattaattaatttatttatttgcttcctttgattttccatttgatttttagtttcaagatttttaaagtccccagataataatttaggtggtaatgatttaacaattttagtaaatatattagtaaaattttcacatatttcttcagtctccccaggaccatttaacattaaatttagtatatcattattaaaactattatctttgttattgttattgttattactatcatctttattatttttagtaattgcttgaatatgagaagttatttgacctatatttctaattgaaccagttttataataaatatagaataatatatatctactcctaccatgttttgaaccacaaattgtaatattttttattgattgttttggtataattgaagcagcttcctcaaaggcattttcaacttcaattggccatttagaagttttacgacgtttaataactggactgtctgttacaaactcatcaaagggtgagtgagaggagttattaacactcattggcaaaagaaagaaagataatattaataaaaagaaatcaacagggccaagccacagaagatagggaaaaccaatgccccgaccctaaattaaattctcgtcaggtaccaacagttttatcccaaattattactatttcgggaaccagctaattccgcactttattacgtcactttgggttatctatttctatctttatacactttatttactttatttactcttcatcagaggatgattggaggtattccgcatagtcctctgctgaggcaaaggttggcaatgatgagaacttaactctcttgttattactactgttatcgtcattctttctctttttatcgttctttccatcatctttttcatattcggattcttcactgccgtaaacatcagattcatcatcttccattaatactttaacatcctctccatctgatgataattcaccattattatcagtcttggatttggatttagatttagatttggatttcttttccttcttagtcttaggtttttcttcaacttcttcttcttcaacttcttcttcctcggagttaaattcttcgtccataccttcaagtgttcttaatttaacaggtccatcttcatcagattcttcctctgaatcagcttcactaccctcatcatcttcatctccatcatcttcaacatcttcaataacttcttcatctccctcatcttcttcatcatcagatatatcagacatacttaaatcagataaatcatcatcataattatcttcatcaccttcaacatcaggattacttgcaactaatgcattccaaactgtatcatcatctaattcactatcctcatcttcatcttcacctctctttgctctttcattcatttctttatcaaattttgaacgcattaatttatcttgttttgtactaaaatattgatagaaaaattcatcttcaggtttaatttgatttgcctttttagaaagccaatcctctgtattggctggtatatcagtattttcaataccagttgcacgaactaataaattacctgtatgtaaaccacctaatggttgcataattgatgaaccttttaaatttgccttacttttagctttcttataaacaaatctatcaaggaaatgtgataatgtatataatcctaaatcaggtttggtaattaatttcttttcatttttactcatttcatcaaatttcataaaattttctgcatatgatctaacagttggatgataatggttaataaaatattgaatttcccaaattgatgatttatctgcattagcaaattttggatctctctttttagaatcataaactttattagaattctccttttccttaatttcatcaagtgattcctcttgttcaatttttttcaataattcttcatccattggtgtattaataaataaatttctaatttctggaatttctctctctaattgaattaaaaggaaaatcatacctgaaattgtaccaatattaagccaattaagacaaacttgtgatattctcttaacaaatgctaaaactcttgaagaattatcatcatcctttaatgatttatataataaatttaaataaataccttgcttggaggaatttaataatctttcatcccataatgattcatataatgttctaaaaaatctatccttatgtaaattatctgaaaatttatttgtaattgtttgaattaaaattaatgcttgaactgatgtattaaaatttaaactatgagttattttataaagaatattcaaatgattttcaaatatatccattgggaaattagagaatgggaaagcacgatttaatcctgttaaaattgctgcaaacattttactatttttctcttcaacaatatcattttcatctttctcatttttaacacttttaccaccttttttacctcttttaactttttgctttcttctaccttccttttgatgttcagtttccttaaatttaccaatattttcattatcagttttaattaataatttttcaaataatgcaaaatatgcatcaactaatttatttgctaatttttcatccttatttgttaaaattgtttgatttaatgtattaattgaataatataatgcatgatgttcattatttgatctgaaaacaatatcaattacactttcacaaataatttgtttcattgcaggatgttcttgttctaataataaaatttgatatgatgttttagatgaaactttattatcaatatcacctaatttattaacacctaatcttaataaatttgcttcttgttcaggttttgcctttaataatgaaaatatatgtgaaacaattttcattctaacatataaaattgaatcatgtgataatttttctaacattgtaataaaattaaaatataatgattttaaatgatcttcaaaatacattaaaattaattgttcatttgataaatttttacttaatggttgtttcttaaaagattttaattttctatcacttggtaaaattgtactaactaataaatctgttaatgcatcaacacattgcattgcagcagttcttgactttttttgacacatattaaataaattatctaatgctcttaaattatgtaatggagcttcttgaactaataatgttaatgcagaaattttatctgataaagtaccacctgttaaaatttgtgaaaggaaacgtttttgtgatgatgatttattaaattcttcatcataaattttattatcttcttcaattaatcttttagccttttcatataattcatcaatatcttgttgttttaaatatctatcaggtgtaatattttctaaatttaatggaatattataccaatcatttcttggttgaactgtaagtctatcagagataactgtttgtaaatttacaatcttgtctggatttttggatttaacttttgtttcttcttctttggaattgctcgcattttcttcttcagattcagatgattcaacctcttcttcggaatcttctgctgcttcttctttttcagattcttcttcttcagcttcttcctcatcttcctcctcatcctcttcttcttcttcagaaactaattcaggtgtaacttcatcatcttcaatttcaacatctttaacagtatgaccttttaaaccaatttctttcataaaatcagttaattcatcagttaattttgaatcaattttaatattattattatcatcatcaaattcttgttcactaagttcatcatcatcagcatttaattcttcaacaagttttaaatcttcatcagttgcacctaattctaatgcttcacgacgtaaaatttcattatttacagattgttctttacctttagatttagattttttatcattctttgaattctttttatcttgctttttctgttttttttcatccttaccaactaatgcattggtaactttatctttcaaagatgctaaattcaatctagccccttccattgtatatatcaaaggtaattgattgttcctagtgggtatagaaagaaaaaaaatatttttcagaaataatattctttaataaaaaaaatttttttaacctactgaaaatttcatgtcaataatctctaaaaagaaaatttaccagcttaaaaagaaaaaaaaatataatacgctccctccggccgggatcgaaccagcgacctcaagatgtcttgtatgctgtttaagcctattacagtctcgcgctcttccaactgagctacagaggggttattatgtttgttctttggtgttgacatcctcgtaattgtctgtgcacgtgactgtttttattttaagggatttattactgattctgcttgttaaatgtgttgtttaaaattactaaaccataattatgatttttggctatagattaaaattattaaattgctggaaaacgtatctttgtttttaatgaattttacaaatttttgtacagtgtaaattttttttaaaatcaccaatcaaaacaaagatttttccaaaatattgaaaacgatcacagttaaaagcttccaaaaccattgaaaacactagatatgtactacaatactatcattttatcaatataattgaagaaacagcaaaaaaattacacttcacatccccccaataccccaattcattttgaaaaaaaacattttgagaaaagtgcccttttctcgcatattctgaaaattattaaacagaacataatcgcatctcgggtactgccattattgcctattatggctaatatctgactatctaataattatattcgagtcatttatatacactataaaatatgtaccacatggcattaatgtctacggaaacatattattaatgacattaaagttttcaaaattgaataatatcccttcttgttaattaagtggtgttttcatttttgagaaatcttttaattggtccctcctcctgcgaagtgagtgcttgatgtattatattaatatatatcaaaatagttaatcacaatttctatctgattgattagttgtttccattttatattcttcttaatcaaaaatgccactgtttggtaaatcagttgtatttgatgttgaattattagatgccccaccacataatagatattcagtaataaatccaattattaatggaattttacatttaaaatttaaggaaaatgttaaaagaattaataaaatgttattaatttttagtggtagaatttatattagatatgatgcattttataaaattgatccaaagactaaagtaaatgaaaaaatatctaaaaccaaagtattcgatagatatcatttatttgaaattaatttaaatcttgaaataccaaataaaaaatcatcaaataatgaatattcatttaattcaggtgaaaaaattgattgtaaatttcaagttgaatttccccaaaataaagtattaccttcaacagtatgttgttttgatgatgatgattatggtgatatattagcacattatgatcttgattttaaaattgaaaggcaaggttcccatgataattctaaaacttatgcatcttatagaaaacctatacaatttcaatcaggcgttaattttactgaacttaatgacattaaaattttagaatatcataataatattttaattaaaaataaaattaaaaaatttagttatgatgaaaggtcaaaagctttaatacctacatcaataaataatccacatttgaaaactaaaaatcttagacaattatgggatgatagatataaaactaataatttaacggattcaatgagtacaattccattaactgtatcatttgcaattccaaaaattttagatttgaaaacatcatttgtaaatcaaatacaaatttcaattagttctaatttattagaaaatggttttaattcaaatgatagcgtagaatttaaattaaatggacaaagtactaaattaggatattttgaaattaagaagttgaaaattagattaaattataaaacaaagattatcacagataaaggattattagttttagtatctggaacttttgtattatcaaaaattgattttaacaatttaaattttgatatttgtgattttacagaagatactaaaggtaattataaatttgatttaacaagtgaaatgttaagtaatcatacagatacagatattaataaaccattatatcaattctcagatgaaactttatgttgtccagatgatagatttttagaattaaattatggtacttcaacattatcatttaaattaacaattgatgatggtatgggtaagacatatgattatagatttgaaacattctccacccctggatttttaatgaataagaggatgttaggagagagttataatgataatgcaccaccaccaatgtacagtgaataaacaatcttatcttcactattacccaataaggaatgttctttccaccctcgctcttaaattaatgacgttacgcggtaccttattgtctttaattattatttatatattgtgcacatgtctttatttattgtcctgagttgttgatcaaattgatgattgtaatgaatcagtgactataacttaattgcacgttcctttttgtatacccttctttttgtatatcttatttatttgatcttatatcctctttattgtcgtttcattaatcataattagattatatatcaatctccacagacaatgttcacaagttcaattaaatacaatataactctttcaaatccaccaaataattttaaatattcaccagctaataataaagtttcaggtacaataaatatagaatttaaagatactgttaaatttattaaatcaattaattattcattagttggtacagctgaaataacttatttttcaactcatttaattaagaataaaaatgtacctgattcacttaaaccacataaatcattaatttcacaaaatttccccttttatgttaaaacaaagaaggctgatttagataaatatttacaatttcaatttaatccgaaaactaaaacttattcatattatactgatcaaaagttgaaaattcaattcgaacatgaattcccaaatgatatgtttttaccaagttcatgttctaaaattggtaataaaaataagggggaattttcaatttattatgatattaaagttgaaataattcaaaaaaaatcaggatttttatcaacagagaaagttttaagtaaatgtaagataccattgatttatcaatcacgtttagattataatattgaaacaaatataaaggataaacatgattattcaattttttcaaaatctgatctctttcaagaaaaagaaaaggcattctattattcaagtgaaaataaatctttaatacccgtttctaagagaaagaatagtatattcagcaaaagtagttctaagtcaaatggatatgaatcaccaacaaggtcagttccattatctattgaagtggaaacaaaacctgaacatgatatgtctaaatcatttattgaacaatttaatttaaaactagtttctgatttaaaaaattttgatactaataataataaatcaaaggaattccaatttaatgatcaaagtacaaaacttggattatttaaaatactttcattaacattagaagttagaaataaaattacaattcaatatgatgatttaattgttaaagatacaatatatacaccaattatgaatataccattcaaggaattattctttgatattaaagatttccaatatgataaagagaaaaaattttattttatgaacattgataatgataaattattaaaacattgtgaaattaatttgaaaacatcattattagatttattatattctaaaactatattaacaactggattcacacctgcatggtttggtaatatttcaagtttaacatttaattggagtatttgtgatgcaaataatgaatcaactgttataaattataatattaatacattatcaacatttaacttcccattagattatcaatctaaaagggcagaattaaaggaagaaattgttgaaaaggaaaaacttgaaaggaaactatccaattcatctactaaatcatgggaaaccatttcatcattaaataaaacctcaaagaataaaccaaaaacaaagaataaaaccaaaacaaccaccaccacaaccacaagtacagcaaatactactactacaacaaacacaactacaactaatatcaaaaactttacaacaaatttatcaaataaagaacttcaaaatattcaacctttcattgaacaaataactaaaactatcacacctggtaaaaatccaattaataatgaagaagttgaagaagcaaagaaacaaatatttaataaaatcgatgatttatttaaaatgattaataattcttcacaatataatgaaaatgtaacttatcaaaacaatccaaatactgagagatattcacctgaaatggaaacacatgtgggagatgaaactgaagaagttatgctaccaccaccttcctacgaagagagtgaaacacagtatttgcaatttataaataaatgaatgactaaataatgaaaatgtataatgaaaatgtataatgaaaatgatcaacattagaaggcttagcttatctaaggtattaccctcttgggaaattaccgaaacgcacatgttctattaatttattaaatcatctctatagccacttatctttcggtactttcttatttccagttttttataaataccacccatgatccgccacacggatgtcatctaccttaactttataacacaacgacaactacacaatgacaaaagttgactatgaaataacatattcaaatccaccaaattttaagaaatattcaccaatgcataatagagtttcaggtactttacgtatgattttcaatcaaccagctgattatattcaatttcttgattattcaattgtcactacagtacaaatttgttattttgaaattatagaaagaatgggtgttaaatcaaagaatcgtatacaaaaggaatctgttatttatgtaaagaataaaaggatgaatcttgatgatgttttaccaaataaatttaattcaagggataataatttatgtttttcttttttcattgattttaatgataatgtgaatagtataggtaactttttaccaagttcatgtcttaattatggtaatatggagacttcactagtttcagtaattcatgaagttagagttaatgttgttcaatttaggaatggaattgaatatatttatgatagatgtgtaattccattattttatcaagcgggtatagatgatagattaagagatgagaacaataaaaatgttttaactacatctgattcacaattatttgacaaaaaggaaagagaatattatttttctgaagaaacaggtaaactaacttcaattgcaaagaagaatagtttattctttagaaaaagagaaaatgctaatcgttatgaattatttacaaaatcaattccattaagtgtaagtatgaaaagtaatgaaataattgatattaccaaaccatttattaatcaatttactttgactttatcatcagatttgaaaactcaaatgatgtataataatcaaacaaatgatttccaatataataataaaagtacaaaacttggattatttaaaataaaatcattacaattagaacaaaaaaatcaaatattaattgatgggaaaattaatgatacagtatatacgccgttgttgaatatacaatttaatgaattttatttagatattaaagatttcatgtatgataaatcaaatgatatttacaaattaaatatttcaagtaatgatttattaaaacattcaaagttaaatttaaaatattcattatttgatttaatgggtagtaaagttgtaatgacaaatggaattacaaatatttttgaaaataaaacaacagtttcatttaattggacaataagtgatggtaataatgatggtaatatgagaatttatcatttggaaacaaattcaacatttgatctccctgatatgtatcataattataatcctaaatcaagggatagtttacaagaagtttctgagaaaaaggccatggaaaaggaatttgagtactcatcacaatcatttccaccacctccaccatcatatgaagaaagtgaaggcccttactacgatatcaaagagaaatcataatgaataatgtctatatcaactgataagaaaaggctgggggaaaattcgtggggtggccgactcagccttgttgataaaagattcgacattattaatcgttgataattgtttgtttgtttgtttgtttgtttgtttgtatatcttctttttcctttgttttctttctataagtatctatctatatatagtcaattaaataaatgagtaagtggtttgggaaacaggcagagatatttgttgatattactgatccacccgttaattataaatattcaccaatttatccaaatattaagggtaaagtattcattaattttattgaaacattgaaaaaagttagtcatataaggtgtggtattgcaggtacagctgatatattatattatgcaaccgatttacaatatggagcatttcaaagtactgcaattaatagacaactaattactcaaagtattaatttttataatattcataatgatttgcctcttgattgtaaagattgttgtaatgagaaagaaaatggtggtaataataataataataatggtacaacaccatcatttacatttgaagagggggagaagattaattataattttgaatttaaattcccagattgtttatttttaccaagttcatgtaaaaattttggtaatattgatggtgatataactgttacatatgaaatatttgttgaaatttatagatttggaggattaaagaataaaccgaaaagatatttactttataaagtaccaattggatggcaatcaggagttgatccaaatttatccaagacaattactacattaagttatcttaaaattgatattttcaaggataaacttaaaaaattttattatgatgaaacaactaatgcattaattccaacatcaattaataaatcacattcatcaactaaatttataaggaaactttggaataatgattataaaagtgagaattattctaattttaccaaaagtataccattaggtatggatttttctattagatcaataattgaattatctgaaccatttagtagtcaaatatcattaaaatttaatgttgatttgaaaagtattggaataatggataataaaggtaaagaatttgtatttaatggacaaagtactaaattaggtaattttcaaattgaatcattattaattgagacaaataatagtttttcattacaatgtaatcaatattatatgaaagaacagagtaagaataggataattaagataaattttaaggaattaaatatggatattaaagatttccaatataataaaatgaatgaaattttccaatatgaattaccaattgaagaaatttccaataaggcagatattgatataaatcaatcattaatggatataatgggagataattcaattatgtgttcaggatttgttcctaattggtttggtaatgttgttaattttattattacatggacaattagtgatggatatagtcaaagaaggaaatatgaattcattactaaatctatgccagatttcttattaggaatggacgatactcataataataatagtagtagtagagaaccagatgaagcaccacccgtctatgaagatattgaacaagatatgaagatatgaagatatgaagatataaagatataaaaagaaaaccgtcactaaccgatacttaccgatattaaccgataaccgtttaagagaagatagcgaatgtgaaatttcggaaagaggaagagggcatagactggattctccgaaaatgccttttacactgaaatataaggcactgttacggttagatattaagagttgataaaggtatattcattggtattgatactgttgttgatttgtacatattgagtggcattagattaattattggtatataaggtcaaaggtatatcctctttgctcttgatttccatttctgctactcatatctgctattcatttactacattttaattacactttactaaacaataacaaataatacacacactatggctcctgtaagtattgaaactacaaaatctacatatactcttccaatttctgaatatatctttcgtagaattgaatctttagatattcataatatctttggtgttccaggtgattataacctttcaatgcttgaacatttatattctgttccaaatttaaattgggttggttgttgtaatgaattaaattcttcttatgcagctgatggttattcacgtacaattggttcaaataaatttggtgttttattaacaactcaaggtgttggtgaaatgagtgctcttaatggtatttgtggttcatttgctgaacatgttccaattttacatttaattggtacaactccttattcatctaaatcaaatggtaatcattatcatcatatgattaatgctgtttcaactagagatccaactgatcattatgtttatgaaaatatggctaaaagtgtttcatgtaaaattgtttcattaactaatgatttatcaaatgctgcaaatgaaattgatgatttatttagaactattattttaactaaaaaaccaggttatttatatgttccttgtgatattgttaataatttaattgatggttcaaatttaattaatatttcaggttcaaaattaattcaaagatctttaccttcaactaatgatgaaattaatttaattaatgaaatttcaattaaaattttaaataaattaattaattctaaaaatccagttattttatgtgatgttttaactgatagatatggtttaactgaaattgttcaaaaaattgttaatttagttaaattaccttcatgtaattctcatatgggtaaatctttattagatgaatcaaatccttattatattggtgattataatggtgatgaatcaaataaaatggttaaaacatatgttcaaaattcagattgtttaattcatattggtgattattataatgaaattaatagtggtcattggactttatataataatattaatgaaaattcaattattaaattaaatcctgaatatattaaaattggttcattagaaaatttccaaaatatttcatttgaagatattttaccaaatttattattaaaaattgaatcattaaataaatcaaatcaattaccaatttatcaaatacctaaaattattaataaaattgaacaaataccttcaaatactccaatttcacaaactaaaatgttagaaaaatttcaatcattttttaaaccaaatgatgttattgttactgaaacttgttcattaatgtttggattacctgatattaaattaccttcaaattctaaagttattggacaacattattatctttcaattggtatggcattaccatgttcatttggtgttagtattgcattaactgaattgggtaaattagattcaagattaattttaattgaaggtgatggtgcagctcaaatgacaattcaagaattaagtaattttaatagagaaaatattattaaaccattagttattttattaaataataatggttatacagttgaaagaattattaaaggtccaaatagggattataatgatattagaccaaattggaaatggactaatattttccaaacttttggttgtaaagattctaaaactgcaattgttaatacacctgaagaattagattataaattagaggaatttggtaatgatttatcagttccaagattagttgaagttacattagataaacttgatgttccatggagattccataaaatggttggtaattaattaaaattagattagtataacttaattaacttttgtataataaataagattctatagagataatataatatataatatataatatgaaaaaattacatatgataatcaataaaatcattaactgttaatttaacaaaatcatccatttcaacaagtacaaattctttaaaaaatttatcatttaaaacactacttaaaaatcttttaaattctgttaataataaatctttcctacgaatacctttatttgtttcaattaaatcttctggtcctctaattgataaataaagtgatgaaactaaaattaatttaataaatctttgtgaacctaatgtacttatatgtgataataattcatcattttcatttaattctgttgaaattgttgatttattttctgatttattactaataattgaatttcttcttgatttaatattttcattttcattattatcattattggttattaaatcttttaaaatttctaaatttgttgatgatatagataattgatttaattttttcaaaaatttattattagaattattgttacttttaaataaattaattccataagattttgtaaatgattcatcacctcttttttcaataaataaatcaattaaaaaataatttaatccattaatttcatttctatcaatttttaaaattgaatttaaaattttgaaaatttgtaaaagtaagaatttatttaattgccaactttcacttgatgtaccatcaatcattttatctaatatactaattaaataatgagtatctaatctaataaaaatttcatcatcatcatcagaacctccattccaagagaataaaaatccaggaataatgttagaatttgtgttttggaaaatattagaattataattaattgatgttgataataatgataaatttgataaaacaattttagtataataaattaaaatttttgaatcatttaaataagcaaactgtgaattaaatggataattaagtgggaatggttgaattatattattttctttaataaattttttaatttcataatcattatcatttccaggaattgatttaaaatcatttattttaaggaaattaataaaatgataaaatgaaggtaatatctttgttgttaaattacgtaaataatttgtaattaaaatgaataaagtttcatcattatgattatttttaattaatttattaatttgtaaaattaatgcattatcaattcttggaattgatgaaaaatttgttgttattggtgtgtggtgaacattagatgaatttttaattgtataattattaataattttagggaaacatgaaggattccaattatttaatcttaaatcaggttttaatgaatcaattttagaaatatttgaaaaagaagttgaaggtgtcattaaaaatgatgaataatttgaattaattgaaggatctaatgtatttttaatgttattatcgatatcacattgaacattaagagtatttgaatcaaaatttaagaaaatattccaatctaatttacttataatttgatgatttgatgtaccaattaaataatttttttgagaatttaataaatttaaattatttaaatcaattattggataaaatgttaaatcattagataataaagaatttgatgaattgaaaataaggtataatattataatataatcatttaaattattataacatgatttatttgcaaagaatatgattttttttttcaatataagagcatttaataaaatatttaatggatttatattttcataaggggttattgaagtttccataaatgttgaaccattaatgttaatattaatattattaaggaaatttatgaaatttttcaaatttgaagaattttgtaaatctataccaaataatgataaatttgatgaaattaatgataattttggtatattaattgggaaattaattggatttaagttgattgaagttttaaataaattatcagtatcaatgaatgtatcatttaattgggatggtagctttaatgaatcgtttaattttgtatcaggttgaattctactaagtacgaatcttgaaggtgaatttattttttgataatgattgaatagagtatcaattttagaattatttaaattatgataaattgtattgagattgatgttattaataaatgaatcatgtaataaataaactaaaaatggtttaaatattgttaataatggtaattgagatataattgaaataccttttgcaatattattattattatcataataactaattgtataaatataacaagtacaaatatttaattcttctttatgattatgattgatagataaattaccatttgaaatattaattgaaattggtataaatgtataatgttcaatattaggataattaaataaattaattggaataagtatatctaataaattatctaattgaatatcaattgaatcagtatcattaagattaaattttgttaaagtatttaaaattttaatccttgaaattgggttaatatcaaatgtaaataaataatcaattactgacattatggtatggtgatatgaagggatgaaaggggataaggggtatgaatggtataaagggtatattatgagttatatatagtgttaatatataatataatgtagtattggtacgataattatttctaaataaagaacaaaaaatcaatataaattaaagataaagatgagatattgcataaaagtacctgaaaaaaggttattaaataaaattaaggtattatttatttagtaatattaaccaataagagagttatttacattattaatcataagattatagtaattattaattattagtattaaatggtaattcaatgtacataaatgaaattaaataattaactgtttaaagttcagtttattgatgttataactataaagtgcatcagtactaatatttaaattaattacaaaagtaacatatcatatatatatacacacaattcaattattccgactagttactctattaaaatcaaacagttaccatcaacaagacaaatcaaccatcaaccaccaacgttcaaccatcagatcggtaataaacggtttgaaaaggagatcttaatataatttatatttatatgtttgcgtcgatgggactatggtcttgggacgatgcgtcgatttaattttcttaaattttcttaaatttcttctgttttcttcagtttcttcaatatttcccactttcgccacttttccattcaatttgccaccctggaaataccactttcttttgaagatactataatcaatcacacattcacacacatttatcctacaatacacaatgtctgctttagatcaatcattagatgctattatctctcaaaataataattcttcaagaaaaaatactcctgcaagaagaacaattaaaggttcaaagagacctcaaatttcttcaaaatctgctcgtggtggtagagttgctttaaataatggtagatcaattagaccaactggtcctgcttctttccgtggtagaccaattactaatcaaagaagggcaattcctacttcaaatattcctgctaaaattaatcctcaagctgcttccttgaaaaatgcttcaaaagttgttgtatctggtttaccaaaagatattaaacaagattcaattagagtatgttattattaactttcaatttttttcttttactttatttcatttcatttcatttccattgttattatattatcattttattttatttgggttttatgttgctgttggttatgtatggtctttagtttatgtggggtttatgggttatatgggttataggtatatattggctttatgtctttaatggtttcttatcaattgcatagacttgattaaccttaatagtctatgctcattacttgattattttatcaagtacttagttcagaagttctagtcactagttctattcattttaaaggaatttattcatttctttgatatcttattcaatcatcaaattttatgatgtctcctctaacaaatggtcaagttaattctatgttactatttgctttattaatgatgatacttatttttatcattttattagaattataattataattataattataattatatctttttattcagttttgcttatactgattcttaatttagttcatttgaaatcaatttggattaagataaaattgtgggattttatcattcaagaataaaataagaataacaattaaaaatattccctgaaaaggaactttttttgaggataaatgtgtgtgatttactgataagactgaattacaaaaaaaaatataatttattataatataattaatagaatgaactatactattatgaactaaactatactagcctttactaatgaatgctttactataccttaccattaatgcctacataacaataaatgataattaatacataatgaaaatttaatgaaaaaattattatgaaatgaaattcaattttatttcacttttttcattttgatacaaatttactaacttattatcttcaaccccctctcatttatttttaggaattctttcaacaagctgttggtccagttgaaaaaattacaattgcatttaatgaaaatggtaaatcaactggtgttgcaactgttatttttaaacaatcatcagctgcacaaaaggcagttcaaaaatttaataatgcagcaattgatggtggtcgttcaaaattaaaattagagttagttgttgatacaactaatgttccacttgcagctagaattcaaccaaatattattccaactgtaagaactaatgcattaaagggtagattaacaagacctgttagaaataatagacctgttaaacctacaagagctgcaattaaaacaagacctgcaaataagagacctcaaccaaagaagaagaaaactattgcagaattagatcaagaaatgactgattattttgcaaataataattaattgatttaattattattattacttttgtattttgtattttactctctttgtttatgtataagtaataaaaaagaaattataagctattattaagtactatatattatatacaagtggtatttagacattgaagaaattatactatttcttcttttcattatcatcatttgaataatctgtaaagaaatgactccaagtaaatttatcaccagttcttcttgatctataacttaaacctgcaccttcatattcactctttctttgaaatctttcaactccatcatctaatgggaaaccaggtttaacagttgaaattgattcaccacttctctctctaactctttcttgcattaaactatcatatgatgatgcctctttaacaaattgtttcttacgacgaattgtaacattttgtttaacaaaatatgcacttgtcattgcaactgcacataagaaaactgcttgtttccaaaatgatttaattgatgggaatgatgatgtcggtgattgcattttgtcaaatgaaagtgaagtagtagttataatagaaattatttaattaaaaatcgaaaattttgcgaatttgttaaattttcatgtcatggttatatttattaaggacttttgcttttacaggtgtattatagtatagtatttaagtacatcaaataagtcagtagtatgtatactatttcaaagtacctacattctaatactaccatcatctactattctacaaatccctttgactgttggtgaaacacgtataatgattacccgaataggtaactaaaagcgtagcggttaaattatttccaattttctttatcgtaacatgtttttattttaaaaattaaacttttgtttatctttttcttatcttttctcttcttttctcttcttttctctttttagacaacaatgacagacaagagtattatacatgcaatatctggtggattatcaggtttggtttcaatggcattaacttatccattagttacattaagtactaatgcacaaactaaaaatattgaaaacaacaataacaataataatgaagaaattaaaaaattaacaaatgattcaaaactttcattacgtactttacatcatgaaatttcacaagaatttggtaattataaagaaactactaatgattcaataattaaaattaaattaattaaattacaaattattttaaaaaaattattattgcgttttaaatttattttatcatattgtaaaaaatattattcaggtttagagagtgcattagttggtattgttgcagttaattttgtttattattatatttataatttaattggtaattatcttaaaagaggatcaaagaatagtttaaatatttcaaatagtttaattacaggattatctgcaggtattgtatcaagagttataactaatccaatttgggttgcaaatactagaatgactgttaacaaagattcaagctcaagtacattaaaagttatttataatatttatcaaaatgagggaattaatggattattctcaggtttaggacctgcattaattttagttacatcaccaatgattcaatttacaatttatgaacaattgaaaaatttattaattaaatttaaaagagttaaaggtttaaatacaatttcatcaattgatgcattattattaggatcatttggtaaattaattgcaattttaattacttatccatattatacaattcgtgcaagaatgcatatgaaaaaaattgaagataataatgataatagttttaaattattttataaaattattaaaaatgaaggtattaattcattatataaaggaattgaatcaaaaattttacaaagtgttttaagtgcaggtttaatattttattttaaagaggaaatgatgtcttttgttgaattattacttaatcaaatcaataataagaacatcagtattaaaaagattacctctaaatctaagaatgtttttagaaaataaataaataaataaataagtgtgtctataaataattccttattcaattaattctttcattttttcataagcaataaacatcatacttgaagttggaattgatttaaataatgttataccaatacctgaataaaaacctaaaatacctttagttttataaatatgtttagcaactgatgtaaatgttaaattttttgaatcattagtttgtaaaattgatttaattgtatcagctgggaataaagtacaatgataaccaatacctgcacctgcacctgcaatcattaattgtaaaattgaaggtttaaaatttttttcaccatttgcaaaataattaattataaattcataattaccaaaccaagccattgaaccaccacattctcttaaaagagttgctgaatgtcccttatataaaccttttaaaccattatttcgtaaaatttcccttgtaatttgactaatattagcattactattactaccattattacttaaattttttaaattttcaacttgaaatttacatttaactaattcaattggtgttaaaacaaatgaagtacaaattccactaaatgcaccacaaattaatttttcacttattttcaattcatcagttaattttttattattaaataattttaataaatcttgtgataaattataactaaagaaaagacatgaaacttccattgatgcacctaaaattggtacttttaaacctttataaaaacctttaattataccttcattattataagttttcttaattgcatggaaagttgaattatataaaggatgtggtaatgattgagaatattgtagtctaactttaattgtatcgaatgggaattcaactaatttcccacatgcaccactaactgaacctaagaagatttcacgtaatgaatctctgaaaatatccctctccttattcatatatatagagagtgaataaaagaaagagatactgatactgattcttaaagataatgaaaaattccaacgtttctttatctaatcaatttcttaaatgagtaatttattttattatgtcaaaataaccgcgggaaagggttctgtcacgtgcccgtcacgtgtgtgtgcagggggcatctcctggtaaccctcgttactcttttaggcaactgctcacaatttcccatattattataataataataatattccgcatattctcatgaaaatttaatttaattatttaatttttcaatttgatgataatagcatttacttgaaagttttcattttaatcttcctttttacaagggatagtctgctcattttaatagcttaaacgtgattattcaacaaacaatgaagtacttagctgcatatcttttattacaacaaggtggtaatgcatcaccatctgcttcagatattaaaactcttttagaatctgttggttcagaagttgaacaatcaaatattgatttattattatcttcattagaaggtaaatcaattgatgaattaattgctgaaggttcaactaaattagcttcaatttcaactggttcagcaggtgctgcttcatctggtgctgctgcttcaggttcatctgaagatgctgctgaagaagaagttgaagaagcaaaggaagaatctgatgatgatatgggtttcggtttattcgattaaattaattaatctagtattaacatttaaatctatatacattttcatattttgtttttatagatatagtataataaaaataataatatattgatataaaataataatctttttactttactttactttactttactttactttttatcatttattgcaagtagatacctcatacgttctatctcttgtttaatttcttcactattatcctcattaccatcattcttattatcaatcatatttcgtaatttacaaataatatgtaataaatctcttgaatctttattcactttttcatacttacttatattctttaaaaatttatctcgtatattatcatattcttcaattaattcaacatcactagtaccaattaaattagaatctggtaattcactatacatttttaatttatctgaagtaattatttcatcattatcatcatcatcataatcatatattccactttcgaaaagataccaatatataagtttattaacattttcaatattctttaacttattctcctttatgtccctctcatattgcattatttgtttaataacttgaaatctattctgtcttaaaaataatgtattcctatatttattcttaatctctttattaactttattcaatactctattaacatcttcttcacttaatttaattccattatcctttaattctttaataaattcatcattatacttaatagatttaactaactttctctcttgttcaattataaactcattgatatcttcaaatgtactaggtactgttaaactcatatactatcttattcttaaacaaaaaaaaagtcctatagaaacttataaaaacacatgcataaataaacatgtcaaaccgcgtatcattaattcaattccaaaccttattatctaaatcaaattcattactttcaatatcatcatattttaatccaaaataatcacaatcaacataatccatcccctgtgatccaaatactccatctctattattattaccaccaattttgaataaattactaacccatttcttaaaatgataaattatataattaattactctcttttgactaaattcattccttttaataaattgtttatttgttattatacttgtaaaactatccttatttcttaataacacttgtttagttatatcattcaaattatcatcatttgttaatttattaaatatttcatcaatggtatttgttgataattttgttgataattgtaattttgtcattgttatctaaatgtcttataaaggatcaaaaatcaaagaattataataatactaaaccaatctatttaaataactctttttaactttactttgtgacttatcacattactacacgtcatatttcttatattatattaataatttaaactaaagtacataaataaactatttatcagtaaatggtgcctttaatggatttataacagatccatatttagtaataacatttggtgtaataatcttttgatgtgtctttgttgttgtccattctttacccattggagctctaagtgatctctcatattcttcccatgtcttatatggatatggaactttatcagcttgatatttactaccttttttattaactctctcatttataataacattcttcttatttttatctaatctattatctttattaacaataccttgaattgttttaatgatttttctttttttattattctttggtactgtccatccaccatcttcttcatcatctgctcctgcccatgaaccccaacctggtactgaaatatcaacttccttatctccatcatctttaataatttcttccttttcttgttcaaattcttcaattaatatatcatctcctgcaaatgcctcttgaattaaatcagattgtttaaacatacgaatatcttcttcattattaccatcactctcatattcatcatcagatttagctgctacattttcattatctttaattttctttggatcaataattttcaatgtttccttattagaaattgaaacttcttcattattaccatttaataaattatcttcttgttttattaatgattcttttctcttagataattttttagcaattttggcacttgatttatctaatttagatgatgatttatcaataactttaactttattagatttattacttttattatcttcatcactatcaaaattatcttcatcatcttcagctaaccatggattaacttcctcagattcttcatctggtttagaggaagaagttctaacatcaacattatcgtcatcatcctcattttcactttcatcttcatcttctctatgttttctctttttagattctctttcctttacagatattctatttttcaataatctagcatcatcttcatctaattcctttaaaagttcagattcaattttacgtgcctcttcagctgcaactaatgctgatggtgtataaattcttctaccattattaatagttatattaacaccattattaatattatcttgattagaacttaaaatatcagtataatcttcattattttcaaattttcttaaattttcaatttcctttaatctaattaatctatctctctcttctgcattcttcataaaatccattgctaaaacacctttaccaacttttgataatttatcattatctatattatcattgaacttttcaatatcattctctaaatcacttaaatctctttcatcttcactactttcattctcatttctacctaattgttttaattttaatctttcactttgtttcatcatttcctctaattcatctctattagatttatcttttgacatacctgatttaatcatttgctttgcccattgtgatgtatttttatgttttaatgtcattctctctttagcacgttgatacattggatcatcattattatcttcataatcttcatcttcaataccatttatttgatttgcttgagaaataagtgattgttcctttaatttttcttttctcatttgtcttctataagcttttgatttaatttttttcaatcttttagaatctttaacacctctatacattaattctctcattaatctaagttcatttgtacgtttcatcatttcagattttgataatttagcagtttcaatattttcaaataaatcttcagtttcttttgattctaaattacttgcatcaattatattatctaattttgattctaattcattaattaaaatattattatcatctttgaaaacattatttttatctaaatcaggtttttcgggtataaatttcaaaacatcttgatctctattatgagcaattatatctctccaacgattaacttgatctttttgaatttcatatgctgcacgacgttcatgacgtttttgaatattaacaggtaatggaattgcaaatgctgaattttcatcattattattaataatttcatcatcatcaaaattatttgattttgatttttcctttaattctttagaatgttttgcaatatcacgtattaatgattcattttgattattattattattctcattatcattatttccatcattttcatcaatatcttcaagcatatcatcaaatgtaagtgaatcaccttgatttggtaaaagaaattcattttctgcagttttatcattaattaataattttttagaagtatctttatcagtttttggtaattttgattttaaatttttcataactgaaccaagttgaacatcttcatcatcagataatttcatttcatcaaatggatcttcttcttcagattctgattctgattctgattcttcacctgattcttcacctgattcttcacctgattcactttctgattcttcacttgcatcattattatcatcaaagacaatatctttatctttatttttaattccattatcctttttatttaatgattttaattcggaatcatctctatcccaaagttcagaaagtgtcataagttcaccttcatcaacagattcccaaccatcttcatcttcaccatattgatttaattttttatcatttttaataactttattcttaccattcttaccattcttctttttaaccatataatcatctaaatcatcatcacttcctaaagcagcatctgaatctaattcttcatcatcaaattctaaatcatcatcttcttcattatcatcaacattacgacctgatttcttttttaaaaatctacttgcattaagaactgcatctctaaaatctggtttatctgatttttcagattctaattgtttagagaatttgccttttctattcccctttctctgtggttttgccattgtctatgtaaataagaacagtataaatataagtaacttttaaagaaactgataatttttcaaattaaaaattttttttccaaaaaaatatttgttagtggaatttccgagagattgggttttactatggggaaaattccgagaatgtacttatctattatggtttatatatcctagatctgtctttaacatacagatacatatacgataataatagataggatactatattcaagtcaatcttctaaacatagtaccttatccaatgaaaagaagagagagtgtggaatataaaagagaaagaaagaagattgagccacagttaccaataggaaatgatctctgagccctttaaaagtgagaggtttcccacatttttattattattatggttatcactatttcttttaagtaaacattacaaatacaattgattaataaaatgacaggtatttcaaccaatgcaattcatgcagatcaagtattaaatagagttacagatgttgtaccaccaattaatgttacaacaacattccgttatccatcaaatcctaatgatattagacctgcaactgattatcaatctgatagttatgatccatcatctgatacaccaatttattcaagattaggacatccaaattcaactagagttgaaaaaattttaagtaaattattagatggtgaagtaattgcatataattcaggtttaagtgcattttttgctgcaattatgtattttaatcctaaaactgttgcaattggtgatggttatcatggttgtcatggtattttaaatttattatcaagaaattataatgttaaaattgttaatttagatcaattagatcaattaaaagaaggtgatttaattcatgttgaaacacctgaaaatccttattcaattgttcatgatattgaatattatgttaataaggctaaatcaattggtgcaaaagttttagttgatgcaacatttgcaccaccaccattatcaaatccttttgattttggtgttgatatgattatgcattcagcaacaaaatattttggtggacattctgatttattagcaggttgtttaataactaaagatccaaaagttaaaattcaattagcaactgatagaattttccttggtactaatattgccaatttagaaagttatttactgttaagaagtttaagaacatatgaattaagaattaaacaacaaagtgaatcagctactaaaattgttaaatatcttgttgaaaataagaataattatccaacattagataaaattcatcattcatcattacaaactgaatcatttgtcttaaagcaaatgaaaggtggtcattcaccagttttcagtattgaattaaatgaaattgaaaaggcaaagagtttaccatctaaattaaaatatttccaacatgcaacatcacttggaggtgttgaatcacttattgaatggagagcagttactgatgctaatgctagaaaaacattacttagagttagtgttggtattgaaaatgttgaagatttaatttcagatttagatcaagctttaagacaataaaattgctatcattatatagtcattcctatcattattatctacatctataacataacatctatctataacataacataacataactataacatctataacaaacaaagtaaaaaggataattacgtaatattaatataattgaaggctcatctactatgacaagaactttgtcataaatgattgccctgcaggctcagctttcatttctttcacttctttcactcttttcttcttcttctgcccttgacttcactctttcttttgtcttgttctgtagtttatgtgttgtggttggtattgaagagttgttacatgtatttaggaggtttggttgtggattaattgtcatttaattgattttgacgagccacctaaaaagtaaaaaatgctattttcaaagattaatggggagtgatattcaataacactttgatgattattattggaagatttttttaattttcaaaatgatttaaaacacaataaaataggataacacaccatatattacgatatattattcaattataatatttaattacatgaattaatacttatagatactgatattgaaagaagacacaaatgttaatattgcttacgtaaaaaataaatatacatgcatgtaatttatcttaacttagaggttgttgtttatctaatctaataatatacttcctcttctcttcttttattacacccccgcccctctaatcaatgtccaaagtacgcaaatacaaaacaaaaacaaaatctccagcattagaattatttgcagaaaacttagaagatgaattaagagataaaaataggaaaattagtaatgatgaaattgaattttatcaaaattattcaacttctcaattaactttacaacaattcttacaaattcaagatttaaatttagatattggatttatttctgatattccaattgatttacaattaaataatgcattggaaaataatgtaaataatttattctcaactgatttttataattcattaaatgatattgaattatctacaattgattataaaacatttcataatcatttctcatttaataattcaattgatttatcatttaatcaagaagaaagtagtatcataccaccagataatgttaaaagtttcccatattccgataaaaatttaagatcaggtttagtatataatacaggtggtttcccattacaattagaatggttaccattttcaattaataataaaaaattcttatttatagttacaattgataaaaatccaaatattgatatatcagaattttctaaaaattcttgttgtttaacaattttagaatataataatgattcatttgaaattaataaaaaaattataattgataatctaattaaagaaattgaattttcaatgatttcaaatgataaaaatgaaactttaatgaaattaacattatctaatggatctgttgaaatttggaaaataaatgaatcatttcttttatctaataattctaaatattataaattattatcaggttctcaaaagattataataaataatgataaatcaattaaaataacaacatcaacatttgttacaccaaaaataattatatttggaactaatcatggactagttggacaatattcaattttggaaaataaaattaactatttaatttcaactaaattaccttcaattacatgtattaaatcaacatatccaacaaatgaaactgatgattcaattaatttattagtttcaacaacagattttattgattatatgattaatttaccattaacaattaataataagaaaattccattaatgaatagattaaaaatttatagatcatcagttatgaatagagaattaattttcgatagaagttgtacatatattaatagtcttaaaacttttttttcaattgaatggccatgtagtattaaatcatatacaattaaagatccaaaaggtagtaataaatatagaatttcaattgatagagaaatatcatgtttaacaaatttaaaatcatttaaaaataatattttaaataatggatttacattaataacgggacatacaaatggtgtaattagattatgtaattttattgaaatgtcaagaataactgattcaaaacaatatccatattcaattcaattatttcaaatgaaaaagagtaatttacaaaataataataataataaatttttcattaatttaaattatagtgttgataaaaatggtgatgtttcaattaaggataaattaaagaaggataaattagcaaataatacacatttagttaattctaatgatatttgtccaattaagatatcatcaattaataaatcaattgcaagtgcatggggaaatggattaattataattgaagatttaattatatagttttatgtattatgtatattatattaccaataaatattaaatttatttgattttgaatattcatttaaaccaccttttagatctaatgctttataacctttatcaattaaatatttagttgctaaacgtgaatcattacccattttacaaacagatactatagttttatcaattggtaatatttcttttaattcattttcatttaatctaattaatttagtatatggtaaattaattaaatttatattatcattttcattaaaagttttcaaattacaaatattaaattgttcaataggtctaacatcaataactaattgatcatcattattgaaagttttcaaattatcaaaatttattctaaatttatcatttaaaatattataattaattgaaccacaaaattgtaaataattagttgatttaataatttcctttgttaatttattacaaatacaatcactttgtttacctctcattttaaaacttttaattgattgtccattattatcattataacctgaatacattaacataattggtttatacggattatttgttgaattataataattagttaatattttaattgattcaattgacattaaaacacctactaatccaacacatggaccaataactccatcatctgaacaagttgaaatattttcaggttttgtaggtttagggtgaatacatctataacatggaccattttgataatttaaaataattaattgaccatcagttttaactgatgaagcagaaactaatggtttatttgttacaatacaagtatctgaaattaaatatttagttattggattatcagtacaatctaaaattaaatcataattattgaaaatttcaattgaatttaaattatctaacataattgaatgtttaattattgttaaatttgggttaattaattttaatcttttaaatgcagattctgtcttatataaaccaatagaatttgaatcatgtataatttgtctatgtaaatttgaaatttcaactttatcatgatctaataaaccaattttaccaatacctgaacttgctaaataaagtaaagctgatgaacctaaaccaccacaaccaattactaaaattttagaattttttaaattaatttgactatttaatgaaccaaattcaggtacttgcatttgtctaccataacgagaatattcttcattagttaattccattttgaatagagaggggggtataccagtatatactacaagaaaagagaaatgtgactaaattatattaagaaaatttcatgatatacacactctatacaatataatcaaacaactttttgtttaacaaagaagttctttaaataagataattgccatacaccagtaccaattaaaataatgatttgaataatagtccatttagttgaacttgaattaacattttcagaagtatctctaaaagttgcttcctttaatcttaataatgattgttctcttttaatattatttaattttttaattaattcattagttttcaatgtaagatatgaaacatcaccatctcttttactatcaactaaaggttttgcatcaccaacaattaaatcaaataaaattctatgttttgattttttagaccaatttgtatgttttggagttatacaaaatttatgttcaccactatctaatgaagtaaatgtaaaataaccaattggagaatttttctgtgatacaactctatgattattatcaaaagtttcatcaattgtaatttcaacttttaaattattattattttcaacataatcatttaaattatcatcaaattcataaactgcaaatttaccaactgcaattgtatcctttggtaattcttcatagaaacatttagtttcatctgtgttgacgtagaaatggagggcattgactacagagagcagggcaaagatgagagctgtacagaccttcatggtttggtataggaatcgataccaaaagtatataaagaaagagtgttatgatcaaaggttcaaaaacaaagacacgtaaagaataaagagagagagagagagagagagagaggttgaaattttttattttattttattttagaattttttttttttcattaggtatattttatagagtaagtttaccagacaagaatggccggaaacagtagaggagcagatgatcctaggttcagtaaagtgttctctgatcctagatttagaagtgtgaaaaagaaggatttaaaagttcaattggatgatagatttaataagaaagaattgaaaaaggaatttacattattgaaatcaaatgctaaagttgataaatatggtaggaaagttaaaggtgatgatgtggttgataatttagataagtattatgaagatgaagaaggagagggggagggagaggaagaagaagaagaagaagaagaagaagaagaagaagaagaagaagaagaagaagaagagtcaaaatcagactcagactcagactccgactcagaatcagaattagacactgaagatccacttgcaaaagcaagaggtatggtagagagtgattcatctgaagaagaagaagttgaaattgattcagatatcgattcagatattgaatcagatattgaagtagaggaaaaaatcccaacttctgatccaacaaatagaattgcagcagttaatttagattgggatcatattaattcaaaagatttatatgcaacctttaattcattcttaccaatggaaggtagtataaagagtgttactatttataaaagtgaatatggtaaggagaaattagcagatgaagaattaaatggacctccaaaggaaatttttaaagcaatacagaaagaaaatgaattggagagtgatgaagaagatgaagaagatgaagaagaagatatagatttagagaaagcaagtaggaaattaattcaagaaaacaatggagaggatgaaggatttgattcaacagaattaagaaaatatcaattacaaaggttaagatattattatgcagttattgaatttaataatttagaaagttcaattgaaatttataagaaatgtgataatacagaatttgaaagtagtggtaatttctttgatttaaggtatatccccaatgaaatggaatttgaagagaatgatattagagatagatgtaataaattacctaataattatcaaccaattgaattttcaacagattcattaagaaatagtaaacctaaattaacatgggatgaaacaccaattgaaagagttcaaatattaagtaaatcttttaaacaaggtgaattagataatttagatttaaagaattatttagcaagtgatagtgaagatgatgaagagattaatattaataaatataaacaattagttggtaagaaggagagtcataaagaacaggaagaagacatagatgaaggtgatgttgatattgaatttacatttacaccaggattaagtaataatggtaaaaatgataataatagtaacggtaaggtcatagaggaagaacttacaccaattgagaagttaagaatgaaggagaaagagagaagaaaggctagaaagcaaaaagttaaggaattaaagaaagaagcacataatggtaagaagagtaggggtaagagagatgaagatggaaatggagatagagatgaagaagaacttcaaattgaggagagaggtagtggtaataagaacaatacaagtgaattagaacattttaacattaaagatattgcaaaacttgaaaagcttaaatctaagaagaataagtttaagaataagagacaaagagagttggagaatgaattagagaaacgtatggagtctagtaaacaagataaattagaagttgatgaacgtttcagtgaaatgattgattctcatgcctttgtaggtggtagtaagttacttcaagatgaaagaaagagaagaaagaagagtaacaagtagttatataggtattatactaagtaggattattattatgtaatggatttttaatttatatagtatatacaggttatttatctctgtaattaagtatagtatacgatatgggtaatacaagtagtgttaatgaagataaggggatgttacagagtgataggagtaataggaaaaatgttaagaagttgttttggaaacatgttaggagtaatatgagtaatattgaattaattacaatttcaacattttcatttggatgtattaaagaattaaatgatacaattacatatgaagaattaatgaataaattaggtatgtctattatacttgatgatgaaagaggtgatattgtttataagatattaaaaggtttaagtaattggccattaattagtgatttccatcatagtggggatagacaatatgatgaatttacattaaatgaattgattattatagtttatttattatattgtaaaggatttaagaaagttggattagatgatgaatatgttataagattaatatttaaattaattaataagaatagtgaaagtatagagagggaagatgaaattgatataatatttaataaaaagaagacaattttatggaatttaatgccaattatacaatcatatgataataatgagaatgaagaattgggaattaatgaaatggaaacattaattaaacttttattaccattatcaattaattcaatttataataaatcatttgaattaaaatataaaattgaaaataggaatatattaagatgttttattaatgggaatggaaacattaattatcaatcatttattaaaacatatcgtgaaactactccattattgattaatccaatatatgaaatattcaattcaatgatggaaagtaataatgatatcacagacacagataaaaaaccagaatataaaattctaacattacagaaaatagcacagatatcaacagtcattgacattaaatcattagaactaaatacaaaggcaatatatagaggatcaagggatggattttccattaattcatttacaatgaaagtagttgataaacaaaggaaaggtagaatactatgtttatcaggtaaggatacaaagatagtggtaattacagatggacaatgggaatcaagtcatagaggacatcgagttagttgtttagaggagagtatagtggtaatatccccacaacagagagtaataagtgataataataacaagagtactatcatcataggagacacttccccaccgtgtactcctatcatcaccatggacaacacactcgagagagcagtgattgacggtgtatctgtaccacttgcagaggtagaagtggtataatatagtaataataataaattcataaataaaccgttggaattcgcagagaataaagtgtatttcccccatttaattattattaacttgttcatctgcttttaagatctctattgtatactgtatatagtgtatactgcactgctacttaactgtaacgggatattggttggctgtttattctgctattttacctctttaacgatttaactatttaactctttgaataaaggttaaataaagtacattcaataaaggaaaggaaaggtcagatcacatatcattctatgatggttgatgaaagtaaagattctattgatcctgaaatggatcgtaataatagtgctagtattatctcaatatcatcaacaacaacaacaactacaactaatgcaactgcaacactcagaaaatctcaaccggcttcatttatacgtaaattatattcaatgttagaggaacctacaatgaataatttaatttggtggaaatcggataattcaaacttctacgttcgttcaggtgaagaattcactcaatctttatcaaaatattttaaacatgcaaatatttcatcctttattagacaattaaatatgtatggtttccataaagttgataattctcatattgataatgaaattcctaataataatttaaatgataaaccatcatcattatcattaatatcattatcattattaaataattcaaaatcaaagataaaatcaaaatctttaaattctaataattcattaatttgggaatttaaacatagttcaggtatttttaaaaggggtgatttggatggtttattgaaaattaaaagaagatcttttaaaaatcattcaaatgataaagatagtaataattttaaattaacttatgatatacctcctaatttacccgttgaaaatgaaatttataattatcaattagataataataataataataataataataataatcaaaataataatcaaagtacacaaaatcaacccccgtatcgtgtacatccatctttaccaatacatgattaccaattagatgataatcaatctcaatctcatattcaatattcaaatccttataataatcaacaagattcatataatcaatcaaatatgattaatcctcaaattaaacaagaaaataataataataataataataataataataataataataataataataataataataataatgataataatgataataataataataataatccacatccacaaccaccaccccttccaccaccacaaccttcttatcatcttcaatataatgttcaatatcctcctcaatattctcaacatcctccattacctgtacaatatcattcaaatgtttcaacagattcaacaattttctatcaattaaaacaaaatcaacatgcaataattgaacaaaatcctaatcctactcaaacatcaaattcaacaccagcaattataaatccaactactaacaccaatcaaacctccaataataataataccaattcaaataccgattcaaattcaaattcaaatcaaaatcgaacattatctcaaactcaacctgaaaattcagatcaaacaccaaatcgtcaaaataatacaaatacaacttcaaataattcaacatctgctaatcaaccaccaaataacaataataataacaataacaataataataccaacacaaataacaatcgtgaatttgattatcaagataatattgatttaaatcatattatgaaagaattacaaaattcaagtacaatttctaacgataaatttaatttattatttcaaagaactgatgatttaatgaaatataatgaaatttataaagaagaaattactaatcttaattatgattttataactatattagatttaattaaagatcaaattaatgattcaggtttaagtaaaatgcaaataattacaaatattgaaagtttaagatctaaatttttacaaagaaatgctaatagggatatgaatattagatatttaatgtatcaaacaaattctttccaatataattcatttgaattacaaaataattcaaatattcaaaatattaatagtcctcaaataccaaatcaattattcccaaatcaatatccaattaatcatattagacaaaatagtgggaatttatcaggttttattaatacaaatcaaaatattaattatccaagacaaccttcaaatgtttcattaacaagtaatccttattttaattcaggttatattcaagtaaatcattcaaataatttttatgattatcctcaatataatcaacaattacaaaatccaccatcacaagtttcaactcctatttattcaactagatttgatcaacaacaacaacaacaacaaaatcagcaacaacaacaacctcaacctcaacctcaacctcaatctcaacttccaaatcaacaacaaaattatcatcaatcacatcaagcttcatcattagctattgaacaaactaatcatgatgataaacaatcacaatcacaatcacaatcaagatctgaatcacaatcacaatctcaaatgccaaataatgatgataataggaaattaccaaaagatgaatcaattgaatcatcacatttaatacctaaacatccatcaatgaatagaagttcattagttagaattccaatttataatcaaaatagtattaaatcaacacaaattggtccaacttctaatccaactaattataatgttccatttcatacatttcaaaaaaataattcaaataattctaatgtttcaaataattcaattcttaataataataataataataataataataataataataataataataaccctacacaaaattctgctaatgattcaccattctctcaaaaagatgtaaggtatagtatatctgcatcatctaatagatcaagaaatcaatctgtttatgatccattacaatcattaccatatcattcacaacaacaacaacaagcaccaccaccaccaccaccacaaaattattctgtcaataataatttaacaccagttccaccaccattacaatattatcaatcaacatcaacaaattattttaatattgatccaaataatttaagtagacaatattcagcgagtcaaatgtattcacctgttggtattattaataataatacaacatcaacaagtgcaactacagttacaactaataattcatcaaatattaataaaactgaagagtcagatattgataaagataataaagtaaatactaatactaatactaatactaataataatattcttaataataataataaatctaaaaagcaacataataataattggtatccaatatataaaatcagtgaatctggtgtttattcaacaaagagtagtagaaatggtagttttaataatatgaatttcaatatgagtggattaaatcaaagtagtacaaataatataaataggaataaaaaggatgaaaatgaaaatgaaaatgaaaatgaaaatgaaaatgaaaatgaaaatgataaagatgacgttaaggagttgaaaacaagtaatgatgaagtaaagaaagataatgatgaaaatgaaaatgaaaatgaaactgttaatttggataatgataataaagaattgaaaaataatagtaaaaaactttcagtttcattgatcttaaacaatactaaacatgatattgatttagatggtgatgataccactaataaacgaattaaaatatgatatgatatgatatgatatgatatgatatgataggatatatattttgatatagaaattttagatttgcttttttttatgtaatatactgttttttaattgtaattttagaagttaaattttacatggaataactgattatattagttttgaaaataagtttatagaaagaaaaaagaagttagataaattatattattattattatttatcaatatatttaatttctggatcattagttggtaataaagtttctttagaatttcttgcgtgttcaagttcttttaagtagtcataacctgacaatacttcaattttatctattaataattcaaatggaccgaatttaccatcagcaattgataaaccaatagattttattctatccttttcaaattcagattgatattgaacttgcacggtgcctcctatttgtaagtacaaattcatttaaattaataaataaattttcccaaattggattattagaagtgttatcaccattactatttgtaaataatctatgttgatataaatcagttcttgacattgtatcagtttgaatattaaccataaattttctattaggtgttaaattcataactcttaaatgtaaaacttcaaatggtgaccaatcccaccaaaaatttgcttgacttttaaataaataaaatggtttaaattgtgcatttggatcttgaattctattctttgttttaaacattgcccaaccactttgtctaactttagtttcaccccttggtaatgtttgattaagattaccatggaaatgtgcaattaatttactttcatttgatgctctatatggttcaaaatatgcagttgaaaatccacctaatgttgcatctgaagttgtttgaattcttgggaatgtctctgccttagaaaagtctagaagtgaaagtctagaaggtctctctgccgctgagagatgtttacctataaacttaaacatggtgtcttgtccaaagtaaaagaaaggtcaaagaaaggtatataaagtacttaataaattacttctcgacaagtattaaaattcatgttgttattctatttactatactttatcttattgaaatatcttatactacacgtagacagatatcatggaacttaaacaactgaggaggcatctaccgaagatgttctttagattattaccacttcatacgggggtagaacttattttcatcttcacagctataaataaaatgtctggtgtctatggacttctttcattattcacaaatcatccaataaatttcattcaatggatgtattatctattaaacacattatttgttattttaacaatgatatgttatacttatttaaagaagacagcttcattttcattatctaatacatcacttaatacagatgaaaatatgataacaattaaatttattgctgcatttattgtattttactttattgatttctttacaggtaatctgtttatggtttatttagctaatctttggcttacagaggaatatttagaaactgattcatcatcattatcatcatcatcatcatcatcatcatcatcaattaagaaaactatcagtcatatgttaaataagagagtttctgatgtattatcagaacaaagtgcaagtgaaggttacgaaatctttgtttgtgttgttactatcttaattagtgaatgtttccgtctatatttcatggcaattgttttaagctactatttacgtttgcgtaagagaatctcacgtacatgttttggatttggaactagatttgttgatttattagataaattgaaatgatttatgaatggataaaaataataataaaattagaattagaattatatattgtagaaataactatctcttttatagataatcaaatgttaaggtattaactgtatagtaagtaatccaccatagtaaaaaaaattttaaatccttaacatgaaatttttttttttcaatgttaaatatactttaatcatcttttataaaataactagctataatgtcatcatcagactactcagatgacgaaggaaatggtcaaacattcaataatagtgtccacacatctaatgcaagagaaaaggcagatattttggaacgttattctgataaaattaatcttgatatgtttgctaaacatagaattacaagagataaagcattacgtgcaactgttaatcaagttttagatccaagaactttaagattccttggtagaattttcaataatggtacaattactaaaattaacggttgtgtatcaactggtaaagaagcaaatatttattattcagaaaatgaacaatcaggtaaagaatttgcagttaaaatttataaaacttcaattttagttttcaaggatagaacaagatatgttgtcggtgaacatagatttggtgaaaaacaatctaaaaatccaagacaaatggttaaaaattgggcagagaaagaatttagaaatttgaaaagattacattctgaacctttaattaattctcctcaaccaattgaattaagagaaaatattttagttatggaatatttaacaattggtaaaggtgaaccatcaccaaaattaagagatcatgattttaaagatttaaatgaaattattcattattatcatgaaatgttaatattaatgagattattattccaaaaatgtagattagttcatgctgatttaagtgaatataatacaattgtacatcaagataaattatatgttttcgatgtttcacaatccgttgaaccagatcatccaatggcaatggatttcttaagaatggatattaaaaatgttaatgattttttcagtagaataaagaaaattaatgtttatcctgaacgtgaaatatttaaatttattataacaccacatgatatcttatttaaagattttgaacatgataataaagatgatgaagaaactaaagaattcttattagattatttaaatactttatcattaaaatcatccgaggatgatgaattcaatgatgaagttttcagaagtttacatttggttagtagtttacataatattgaagaaagagattttaataaatttagtaatggtgatatagatacattagttgatttagtggggagtgtgaaaataaataaagatgaaggagaaaatgcagaagaggatgaagatcataacgaagaagattctgatgaggaagacgatgatgatgaagataattctgacgatgaattttatagtgatgatgaaaggaaaaataaaccaaacaatttaaaaagattccaagataaagatgaaaagaaattacataaacaacaagttaaagaagctgctagagaaaatcgtaaatctaaaatgaagaaacatgttaagaagaagttggttaaaaagggtaagaaatgattttgttaaatttatgtctataaatatttcttgtaagtaatgtatacagtgttagtttttctaaataggttaattaaaaagttaaatttaaatcatattttcattcttttgttagcaaaatttgaatttttagatttaatatatttcatcatttcactatagtcattatcaatcatattgaaatctgcctctgaatattcagtaaaatcaaatgttatatcacattcaacgtcaacatcaacatcatctttctcgtcatcatcaattctagtatcgaaaaatccattttctattaattgattcaaattaatttcatcatcacatgaaatatacgacctttgatcaggaattacattctcttgtttattaattacaaattgttgatattctggtgcaattaatttcaaattaataactaaaaagccctcacttttctctctcatttgattctttattaatgataaccaattaggtctattgttaccttcattacctgtttcatttctacattttgcctgtgcctcttttaaaaatacatataagtatttgtaatcagtatatttacatgacattaaatctaaaaatgtttgtgatttaacatatgatatatccatgaaaaatttggatttatctaaatttggttccttgttcatcatatattttctcaatgtaagatatttagtgaaatatttaatcattgattcttccttaatacaaatattctctgattctatttcaatgtataatgagtcattcataaacttaaaacaattaatgtctaaatttaaatactctccaaattgtgctaatggggtaccagttaaagctaaataacctatcaataaacaagttatacatgcaattgatcttttaatattttcattttcatcaatattattatttccattgaattcatcatcttctaattgacgtttatatttactttgaaacttttggaattcttttttaacaatttcattttcaatatttagaccagctaatgatttaacatataaaatttctgaatttaagaaagactcaattctctctatcattatgtttaaactgaataatcctaatattttacatccaatgaatttatccttaagtaaaactggatgaacataagtgtatttttcatgattgaaaaaaggtttcattatgtatgatttttttcttaaaaaatagtataaggtgggataatacattttttcaataatttttcttaattctccagttttagtagcctgaccaagtttcaaagtgaaattttcatcatttttgttggttaatttgcttaagaaacttaatcttatgatatatagtaaagattgaaatataacttttctccttgatggtttgaaaaatgtaagtgtcttagaggatttatcaaaattacaaatagaaaatgtaaatattgtttgtaaaggtgtaaattctgaggtttcttgagttgaaatattaatgaaaagattacttatcaaatcccataatttcaataaatcatcattttcagtattgcttgtaatattgaatttaaataaaaaggtttctattttacattttctcataataagtaatagaagtttttcaataatgaatttttgtgaagaattaaataatggtttatagttaggtgattcacaaaagctcaaaattaatttgtcttcaacattgtatgccataagaagtataatgatagctttggaaatgttttcagcatataatctgattttattattattgcttagtttaacaaagttaaaagaatgattgcttgtttctgataaatatagtttcataactttagatttatgaaatgtaaaattttcattatatttataagcttttgaatatattgttattagatctgtcaaagaatcagttaaaaaattctgcattttaataaaattcgaaacaatcttagagtgattcagataataataataatcctttatttctaatttgttaataaatttcacaatataatttgatttaaacatttcatcatgtgaagatatctttgaaactttgtattgtttgtaatttttcgaagaagattctaatatttctgactttagcttgttctgtttaatataattttcactcattaatacactcatcattcctcttgtaaataattgactacttgattctgaaatataaaatttagttataattttaatgtcttgtccatgaatagaattgatatgacgaataactgaatctcttttcaaatatgaacgtaaacaaagatcacattgaaatgaattatagataggaagaagtggatcagctttacaataaacatttaatagaccaagtttcttattaccaattgaaagtatatcatcaaaagaatgcttaaaatctatatcaaatctgtatttttttctggtacattgaagttttatattagattcttcatacaagtttctaatccataagttaattaaacttaattctgatggtttgctataaccaaaatcacatgcatcaattatggatttaagtattacatttgttgaaacaccatttaagacaaatgcaaagttttcttcagatttgaaaatagaacgtacatgtattaagtatccaatttcaacatttaatattatacccaaatggtttagttctgggtatgttgcatatactttctcaccaagtttttcattgattgaattaatatactgttcaaatttctcttcattatgcattttaaatgtactttctttattatctggtatttcatagtttctgtaagtattatctagcataaaatcatcaaagatggtatcaatgggtggtacaaaatgaggaagtctttcctttaggacattttgtagccaaaacatttcattatgtgtatcaataaattatcataaataataagttagttaagtgaaatttactaagaaatcaatgtaagcagcttcaagattaccgcactcagtgaaaaaaaaaacattttgaaaaaagtgcccttttttcggctatttttgataaattgaatttttgactacgcgaattctcggatatggattttcttaatttgaataaaagcttggtgggtgttgtattgaacagtagtaccacatagtaaacataagttgttgattgtattcgattggatgaatcagtatagtagtattttgcataacatgtgttataattttaattgaagtattttcatttatcataaagtgatctttattgtatttgtttaagaaatttagacaaaataaaaaaattatataataagtagggaaaagcgtaaagatgaagacaggacacagtgttaaaactaatcggaaaattggaaaaaaacaatcaaaaataccccctatagtgtggtgaattttcactcaaactacccttagccgaaataatgatgttatgatttcagatgttttctgtaatacccgaaaaaacggttgttttttcaaaatgttttattttcaaatgaaataagtttttctgagaaaggttaataaaaattatttgagttaacaaattccgcaaataacttaaaaaactttttttttcaaagttcaaaatccggttaaaaaaattttgtctatgaagaacttttttttcaatttgagaaaactttttaaaatttttaatcatctcaaaatttcaagactctcactctgagaatattatttttttttggtagatcaaattttagtattgagtaacatagtaaaatattaattttttcatactttttctgtaatttgtaaatattcattagtttaagtgattatttatcgtattaataagtattattattaattgtacttattaatacacatgtaatatttatgtaaattcttgaaagtgatatatcatggtttactactaaattagcggctcagctaaggtatgtgcgaagttggatagcagcgaggaaaaataaaatgactagcgaatttcaaagtaaaaaaataggtttcgaaatgaatgtagtacgccctatgaatttttcgctagattacgcagtccggtggatatatgtaaagtgagtagtcaaaaaatactagttcttagtaatttttcccactcaaactttattttgtgggtaattaaaaatttatcaatttgattttccccacacttcaattttgaaatttgtaccagttcatgactacgaatttgattttgattccacactatgtgtgcgcaccaaacacctaaaattgtaatactaccagtcactaagttttaacaaaacaaaactttcaacaacggatctcttggttctcgcatcgatgaagagcgcagcgaaatgcgatacctagtgtgaattgcagccatcgtgaatcatcgagttcttgaacgcacattgcgccccatggtattccatggggcatgcctgtctgagcgtcgtttccttcttgcgcaagcagagttgagaacaggctatgcctttttcgaaatggaacgtcgtggacgaagtgaactaaatttttagcacgctttggccgccgaacttttaactaagctcgacctcagatcaggtaggaatacccgctgaacttaagcatatcaataagcggaggaaaagaaaccaacagggattgcctcagtagcggcgagtgaagcggcaagagctcagatttgaaatctcacctagtgtgcgagttgtaaattgcaggttggagtctcgggttagacgtgtgtgcaagtcccttggaacagggtgccactgagggtgagagccccgtagcgtgcatgtcgacacctgtgaggcccttctgacgagtcgagttgtttgggaatgcagctctaagtgggtggtaaattccatctaaggctaaatattggcgagagaccgatagcgaacaagtactgtgaaggaaagatgaaaagcactttgaaaagagagtgaaacagcacgtgaaattgttgaaagggaagggtattgggctcgacatgggatttacgcatcgttgcctctcgtgggcggcgctctgggtttttcctgggccagcatcggttttcgttgcaggataaggacaattggaatgtggctcctcggagtgttatagccttttgtagatgctgcgtatggggaccgagggctgcggcggactcgtttcgtctcggatgctggcacaacggcgcaataccgcccgtcttgaaacatggaccaaggagtctaacgtctatgcgagtgtttgggtgtaaaacccgtacgcgtaatgaaagtgaacgtaggtcggaccgctctctcgggggcgggcacgatcgaccgatcctgatgtttatcggatggatttgagtaagagcatagctgttgggacccgaaagatggtgaactatgcctgaatagggtgaagccagaggaaactctggtggaggctcgtagcggttctgacgtgcaaatcgatcgtcgaatttgggtataggggcgaaagactaatcgaaccatctagtagctggttcctgccgaagtttccctcaggatagcagaagctcgtatcagttttatgaggtaaagcgaatgattagacgtctcggggtcgaaatgaccttagcgtattctcaaactttaaatatgtaagaagtccctgttgctttattgaacgcggacgtttgaatgcagagcttttagtgggccatttttggtaagcagaactggcgatgcgggatgaaccgaacgcaaagttaaggtgccggaatgcacgctcatcagacaccacaaaaggtgttagttcatccagacagccggacggtggccatggaagtcggaatccgctaaggagtgtgtaacaactcaccggccgaatgaactagccctgaaaatggatggcgctcaagcgtgttacctatactttgccgccatggcgtgatgccttggcgagtaggcaggcgtgggggtttgtgacgaagccttgggcgtgagcctgggtcgaacggcccctagtgcagatcttggtggtagtagcaaatattcaaatgagaactttgaagactgaagtggggaaaggttccgcgtcaacagcagttggacgcgggttagtcgatcctaagagatggggaagctccgtttcaacgtgtgcaattctttgcaccaccatcgaaagggaatccggttaaaattccggaacttggatgtggattcttcacggcaacgtaacagaatgcggagacgccggcgggagccctgggaggagttttcttttcttcttaacagcttatcaccctggaattggtttatccggagagggggtcttatggctggaagagcgtcgcctttgtttgcgacgtccggtgcgcttgcgacggtccttgaaaatccgcaggaaggaatagttttcacgccaagtcgtactcataaccgcagcaggtctccaaggttaacagcctctagttgatagaataatgtagataagggaagtcggcaaaatagatccgtaacttcgggataaggattggctctaagggttgggtggatgtgcttcctgtgctggccatgcgtgctggcgctgcttcttcgggggcggtgctgctagctacgcttgcgcttgcggcctccacggttaacaaccaacttagaactggtacggacaaggggaatctgactgtctaattaaaacatagcattgcgatggtcagaaagtgatgttgacgcaatgtgatttctgcccagtgctctgaatgtcaaagtgaagaaattcaaccaagcgcgggtaaacggcgggagtaactatgactctcttaaggtagccaaatgcctcgtcatctaattagtgacgcgcatgaatggattaacgagattcccactgtccctatctactatctagcgaaaccacagccaagggaacgggcttggcagaatcagcggggaaagaagaccctgttgagcttgactctagtttgacattgtgaaaagacatagagggtgtagcataagtgggagctccggcgccagtgaaataccactacctttatcgtttttttacttattcaatgaagcggagctggtcttgacgaccacgttctagtgcgaaggcatcttgtgtgccgatccgggttgatgacattgtcaggtggggagtttggctggggcggcacatctgttaaacgataacgcagatgtcctaagggggactcatggagaacagaaatctccagtagaacaaaagggtaaaagtccccttgattttgattttcagtgtgaatacaaaccatgaaagtgtggcctatcgatcctttagtccctcggaatttgaggctagaggtgccagaaaagttaccacagggataactggcttgtggcagtcaagcgctcatagcgacattgctttttgattcttcgatgtcggctcttcctatcataccgaagcagaattcggtaagcgttggattgttcacccactaatagggaacgtgagctgggtttagaccgtcgtgagacaggttagttttaccctactgatgaatgttgtcgcaatagtaattgaacttagtacgagaggaaccgttcattcagataattggtttttgcggctgtctgagcagacactgccgcgaagctaccatctgctggataatggctgaacgcctctaagtcagaatccatgctagaacgcgacgattacttgccctcgcacatttgagaaggataagaataaggcacttgtgtcgcagaaccgtagtaggtcggcagcggtgcgcgtggcggaaaggctgcgtgtgcttgccggcggatggcaatgtcaggatgcgcgaggataaatcctttgcatacgacttagatgtacaacggggtattgtaagcagtagagtagccttgttgttacgatctgctgagattaagcctctgttgtccgatttgttgcttcggcggcgaagttgcagtttgcagatgcgagctgggtatttcggcgagatttggggatgccggcgtggccgggtggtgggggatgctgttgggtgccattaattcctagtccgtggcttggtgtatggtatacgttgggacgggggtggtggatttgggtcgatcgtctgggagggtattttttggacttagaaaataaaaaaggtgagtaatgtcagacgggatttttgcttacgtaagggaggagagtggtagggtagggattattgcttacataaggagaatagctatgatgtcagaggagattcagagttatgattacttaagttagtgattacataattagagatggttatgtacagtggcctgtggagattaagacttatgattacgtagtgcagtgattacttaagacgtacagtggtccgcggagattagtatagacttgtagacttgtagacttgattactgaattagttatgaagtggtgagcgcaataacacgtgagatgactccagtgactcaatcacgtgaggcgaccgaagtcaagacacagagtcatattaaagaaccaagagaagaagagtcagagggagttgactctgaagaaagaatcacgtgcggacagaggggtttggggaaaagagggctgaatacttcctaaaacggcaagtgacgcacagaaattagggaaatatggtggtgaaaaattttcactgcacggctgtagcacgaaaattagtatgtagagacgcaacgacccgaaaaaagagctaaaaagtaaaaaacgcactttttggaaattattaagaaagtaatttattttacacctagaggtcaaaatatggaatttttgactaactttgaacgcttatatctggacaaccagagcaggtatgcattagtgtagggtatgggtgtgaagcctgaatttttgtgcgcatgtaggtatatgtagtgtgtagaatgactgcgggagtaagaagatagtaaacggaaggtgataacggacataaccaaaagacaacgaaagtggtgtcgtggcggctcggcgcggcggctcagcacgctgatagcggctcagcagcgtacgataagaaaaaagtcgaggggctcgtgagaaaaaataatttttgcgactcgacgaaaagtggaaaaatgtggcggtggcggtgtggcggtgcagcgagtagcggcgcatggggtgcctgtggcgcagcggaaaattgggttcggaaatttggcgcgcgtggtgaaaagtgacgagcctccgcaaaattgggttcggaaatttagaaaaatttttgaaagtgacgagcctccgcaaaattgggttcggaaatttggagcaaaaattgaaaagtgatgagccaccgcaaaaaggtgacgagcctccaagagagaaatgcgccgcaaaaaataatacgcaatacgccacaagaaatacactatgaaaaatactatgaaaaaaaaaaagattgcagcacctgagtttcgcatatggtctcccactacactactcggtcaggctcttagcagcttaactacagttgatcggacgggaaacggtgctttctgctagatatggccgcaaccgacagtgttcgatttcgggcggtattatggatgtcaaaatgaaaaaggccttttttctcgggctacagacgtgctgaggacacgagacccagtgcgttggaatcgcattgttcaggagtatctgtgtaaattttatggaggcaaaagaaggggtaaaaatatgattttttatttttcatgggaggtaagtgaagaatttgactgggaatatctgtgttggtggatgtactagttgaaagaagtatattttatgttgttttttttgactttttagagttggataggcaacagagagcgtagaatatagtggtaaagatttaacatgggcatattttggcgtgttggaggagttacaagggtaaagtgtgatttgggtacaacagggagggtgtaataaaaaacaaagtatgttctttttgacgatattatatgcttaacgtggagatccagtggtgtttattatgaaataaaattatcaaagcgaaagatgcactggttgtggagaaataaataggtgaagttagtagtgtgccaagttcaacagtgaatatctcgacaaccacgccagctagagacatgccttgtagatagttttgatcagcgtgttttactctctaggaacagtgtttaacataggcataatggaaattggccaaaaccaaagttcatctggagagaagtggtttcatgggcaagttgacagggagtgcccagtggagctgtgcccagtggagaggcccttcgtgggcaagcaggcaaattgtgtgagtacttggctggaaattttggcaaagtgagaaaaaggcacagcgagggtgttcactggggagttgcccagtagacattttttcatgggcagctgccgggtagaaacccaatatgagaaatttcaaaatcactaagtcaggattctgagagtggtaggaggtacaagaggccagggagagtagagaacagagattggaattggaaaatccggcctgagaggggagttacggggggtgttgatattgttgcccagtgaagtgggaatttcgtgggaagtagactgtgagagttttgaattttttcaaaattttaaattcgctggggagtttgaaagtttttgtcgggcgagtattacattccatgggcagtgcccagtgaaggaaaacacacatcaaattttcctagtttctgtcctattgcttagttacaaagatatgttgatcaggatgctctgtatagtgtgccatgtaattatgaaggtgtaggaaggcatattgggcaagtttgcaaattgggatttgttagaaatgcatgcacggctgacggctcagcagcaatgacaaaaagaaaaacttcacctcgcgctcgaaaacattgcacgccaaaacgaagtccaatttaactcctggacgccgcggccaacgcgcgctgcgaatttttggcaagattacgcagtccgggggatatacatgagaaaagcacttaaaaaatgcggttcttagcggtgttgtgcaccgataggccaagatcccacggagagtatgcaggggcgtctacggacaagcctgggtatggccggggacaagagacgcaagtcttggacaggggcattgtggtcttgcgaccgtggtgcgcactgacggggccggtgggttgctagctgatagccagcggaccactaggtttattggggacggggttggagatgtagccgtgcaaacgtgacatctgggaccactctccactgaagcggacgaagctgtactttgtacaggggacctccgttgaagaaagtcaaacagtgctatgtgtaggttaatccaaccaacgtaacaaaactcatctgagcgtagttatctggttgatcctgccagtagtcatatgcttgtctcaaagattaagccatgcatgtctaagtataagcattatacggtgaaactgcgaatggctcattaaatcagttatcgtttatttgatagttccgttctacatggataaccgtggaaaatctagagctaatacatgcgtaaagccccgacttcgggaggggtgtatttattagataaaaaatcaatgccctcgggccttttgatgattcataataacttttcgaagctcatggcctttgtgctggagctggttcattcaaatttctgccctatcaactttcgatggtaggatagaggcctaccatggttttcacgggtaacggggaataagggttcgattccggagagggagcctgagaaacggctaccacatccaaggaaggcagcaggcgcgcaaattacccaatcctgacacagggaggtagtgacaatatataacgatacagggccattggtcttgtaattggaatgagtacaatgtaaataccttaacgaggaacaattggagggcaagtctggtgccagcagccgcggtaattccagctccaatagcgtatattaaagttgttgcagttaaaaagctcgtagttgaactttgggcctgggcgggcggtctacctatggtaagtactgttgcggccgggtcttttccttctggctaactcttcggagtgaaccaggacgattactttgaggaaattagagtgttcaaagcaggcctttgctcggatatattagcatggaataatagaataggacgttatggttctattttgttggtttctaggaccatcgtaatgattaatagggacggtcgggggcatcagtattcagttgtcagaggtgaaattcttggattaactgaagactaactactgcgaaagcatttgccaaggacgttttcattaatcaagaacgaaagttaggggatcgaagatgatcagataccgtcgtagtcttaaccataaactatgccgactagggatcgggtggcgcttcttgcccactcggcaccttacgagaaatcaaagtctttgggttctggggggagtatggttgcaaggctgaaacttaaaggaattgacggaagggcaccaccaggagtggagcctgcggcttaatttgactcaacacggggaaactcac
